United States Patent Application Publication US 2003/0165831 A1 - sequence listing, part 5

SEQ ID NO: 21845 - DNA, 4412 bp, Homo sapiens
  misc_feature 1, 4412: n = A,T,C or G
ngcgtccggccgacaagtgccgcggcgacggcgcacccggtggccgcccggacctgcttattgctgtcaagtcggtggcagaggacttcgagcggcgccaagccgtgcgccagacgtggggtgcggagggtcgcgtgcagggggcgcaggctcgggcggggccgacgaagttggggagggcgctcgaacccactgtcgcgccctgctgcgggccgaaagccttgcgtactcctgggtcctgctctgggccttcgacgacaccttttttaacctaacgctcaaggagatccactttctagcctgggcctcagctttctgccccgacgtgcgcttcgtttttaagggcgacgcagatgtgttcgtgaacgtgggaaatctcctggagttcctggcgccgcgggacccggcgcaagacctgcttgctggtgacgtaattgtgcatgcgcggcccatccgcacgcgggctagcaagtactacatccccgaggccgtgtacggcctgcccgcctatccggcctacgcgggcggcggtggctttgtgctttccggggccacgctgcaccgcctggctggcgcctgtgcgcaggtcgagctcttccccatcgacgacgtctttctgggcatgtgtctgcagcgcctgcggctcacgcccgagcctcaccctgccttccgcacctttggcatcccccagccttcagccgcgccgcatttgagcaccttcgacccctgcttttaccgtgagctggttgtagtgcacgggctctcggccgctgacatctggcttatgtggcgcctgctgcacgggccgcatgggccagcctgtgcgcatccacagcctgtcgctgcaggccccttccaatgggactcctagctccccactacagccccaagctcctaactcagacccagaatggagccggtttcccagattattgccgtgtatgtggttcttccctgatcaccaggtgcctgtctccacaggatcccaggggatgggggttaagcttggctcctggcggtccaccctgctggaaccagttgaaacccgtgtaatggtgaccctttgagcgagccaaggctgggtggtagatgaccatctcttgtccaacaggtcccagagcagtggatatgtctggtcctcctagtagcacagaggtgtgttctggtgtggtggcagggacttagggaatcctaccactctgctggatttggaaccccctaggctgacgcggacgtatgcagaggctctcaaggcgtggaggggctccggccgccacagcctgaattcatgaacctggcaggcactttgccatagctcatctgaaaacagatattatgcttcccacaacctctcctgggcccaggtgtggctgagcaccagggatggagccacacataagggacaaatgagtgcacggtcctacctagtctttcctcacctcctgaactcacacaacaatgccagtctcccactggaggctgtatcccctcagaggagccaaggaatgtcttcccctgagatgccaccactattaatttccccatatgcttcaaccacccccttgctcaaaaaaccaatacccacacttaccttaatacaaacatcccagcaacagcacatggcaggccattgctgagggcacaggtgctttattggagaggggatgtgggcaggggataaggaaggttcccccattccaggaggatgggaacagtcctggctgcccctgacagtggggatatgcaaggggctctggccaggccacagtccaaatgggaagacaccagtcagtcacaaaagtcgggagcgccacacaaacctggctataaggcccaggaaccatataggagcctgagacaggtcccctgcacattcatcattaaactatacaggatgaggctgtacatgagttaattacaaaagagtcatatttacaaaaatctgtacacacatttgaaaaactcacaaaattgtcatctatgtatcacaagttgctagaccaaaatattaaaaatgggataaaattatacatttttcttctcagttcttttcaaaaggattaatatttttaaagcacatatatgctactttccattagcaagacccatgaagggactgagcagcccagccttccttgagcccccagaggctttgagccatgaaatggcccagccaggggccagtgcccagggttggggcagagagccagcccacagtgcagaacagaatgctgaaacacaacaaaagtaggaagatgtctttggctaaaactttggcattaaataaaagaggcaaacaggatggaaacatgcagccctgccagccaggatggggcagagcaggggcacaggcaatcttgaaagctgactccaacaggggtgagaaccaggcctgggcatgtacctggatggtagaaagctgtgtttcaaccagtttggtgtgcccaggcagggagcgcgtgcaagaaaggaacagggaagggcaggtgggccaccctggccacagccagctcatcaagtaactaaagtggatgtagtgcaaatgtcgcaaccaagtactatggacacgctacctgcttgccttaagggtcatgtggcaatgtggagccaaaggcaggaccttgtccttatcctgggtgcctgtgtcctcagtcacagaaagagccccaagtcttcccaatgtgcatgggacaagggttgacctctcctgcctccttgttagttgagagctcctgggtccaggaatcaaggctcaaactttgtgcttctctttgcagtctgtgtcccctgctggcaccagcaggccaaagatggacagaagaatatctgggccactcagcccatggcagagcacccagcctgagcccaacctcagaacatcacaacagcccttcagcactggccaggtgtccaagaaaacccacagggtggtacagaggcccactgagcaggatgtgatgcacagttccacgggacagaggggcatgggtggtggtgtccctaggggagttccgctgttctcaggtggctaccaggcctgggggggccatacagggtcaccgaggcaatgtggttgttctgcatgacctcaaagatcattcgctgaagaccaaagcagaatgtggaaccaaatgggttggtgttgtttggggaggaagacctgtgcaggacaacaggcttctccacagggtggcccaggagctcctggatgttgtcccacttgctgtaggtcgtgcatgtttctgtctgaccatctgcgttttctttctttatggctagtgggatcttgaactcacagcgatgataaatgttgaaattataatgcccagggtaattggtgtgtagaacaaacttcttcactttgtgtgtattcgcatcaaagaggatgtccactccaagagtgaagtagttaaaaaagtagtcattacacttcgatggaacttgtttatgaggggaaggagaatgaattttcatcttgtcttctgatttatagaagactttgtgtggagagccaagcatgctaagaacatcttggcaggaatcaccaaaatacactgaacgttcaaatacccgcatcttggcatctgctaataggccaggtccacaacctgcagcaagtaggcgaagtcgtaaacctgcaggtccagttccatctcgaagaacatctacactctcagcatagacattgcccaggaaacagctcagaggcatcatgggagccttggtatcctgcaggctgttgccactgtagatgtacattcgttttacagttgctccatggggtatctggagagaagccaggccatgggcaaaattgggctcatactttggagcctcagtccatgagtctaactgaaaagagaaagacagtcctctgaagttgagatggaagagctgctcagcggagttgtacactccaggatgggttgcgccaaaagactggtcaatctgttcaatggtaggagctatggcctgagaattaaaatgcacgccacaatattttaactttactttagtcaaatcacatacttcgatcaccttaagtctctgattgaaagcatcaaacattagtttgatcccgtcctgagtcaggttaagaatgaggtcatggcttagaggagactgttcactgtagagaacctggacgtttttgatgatgcgacagtgcttctgaagaatggctactgcctgagccagaggcattcccagcgtgaattcccattgctcgttccccagagagcgttcgggcactacctccaggtccagcattggttcggctcgcctggcccgggcggcctccctgcggcagcgcagaagggacccgagctgcagcagccgcggcagcgggggcaacgacggccccacgcgtccgcggacgcgcgctttccacctcatcccggcggcagcggcan

SEQ ID NO: 21846 - DNA, 407 bp, Homo sapiens
  misc_feature 402, 403, 404, 405, 406, 407: n = A,T,C or G
acctaggaggaatatttgctctgtgccatcagccgcgtagaaactagaataaccagctgccatattgtgagctgcattatgaagaggaccatgtggcaagacactgagggagatctccagccaacaacaactcataagcaactaaatcttgtgatgaaccactggagtcatctggaaagaggatcctctcaccttcaatctttgaaatggctagagctctgatgacagttggattacagccttaggagaaacagagagccggggaaatttgtgcccaggttcctttcccacagacattgtcagataataaatatctctgcgttttctacctccggctaaaaaaaaaaaaaaaaaaagttttttctttggccggaccccccttgggggaaatttccccacccnnnnnn

SEQ ID NO: 21847 - DNA, 675 bp, Homo sapiens
actggaaggtgatattaaaggtgaacgtgtattataatggggctgtgttgatttctataagtggttcatatttttcctgcgaatttcttaggatgtaaccattactaacgatggtgcaaccatcctgaagttactggaggtagaacatcctgcagctaaagttctttgtgagctggctgatctgcaagacaaagaagttggagatggaactacttcagtggtaggtagactggctaaagaatgatcatttttctaaaaacgaccgactttcagaaagttgaagccataagtgggtcatttgtgctgtgtcagaaataagttacatattctgaatgcccagaagattgagcaagaagaaaaaacaagttacacatttaagaggggaaataagcttcttaggtacagattcagaaacaaaatttgtaagttgatagttacagctagtttgtacagtttaagtaggaaagaatttgagttcatttgacatagccccattgttttaaatgttggtattcacaagttttgagggcttatttttccttttatggcagtattcagacatcacacagatttttttatggtctctcaaaagtcttgcttcctcccccatcaccccttgagacttggaaagctctcaacttttctgattatttggagggataaaatgtaccaatc

SEQ ID NO: 21848 - DNA, 954 bp, Homo sapiens
  misc_feature 1, 10, 12, 14, 16, 18, 23, 29, 32, 36, 37, 38, 44, 46, 62,69, 71, 72, 73, 81, 82, 84, 85, 91, 98, 100, 105, 107, 954: n = A,T,C or G
naagcagganancncntnagagnagtcanccnaggnnngtcttnanatggcaattctgcagnccatgancnnntgcattanngnnttgctnacgggcntnaaatngnttgatgtgaagacggaaaactccaagcaggaaggattttaacattttgaatctgattgactcatgtggtttctcagcacagttattccatgggctaaaataaatgcagaaatggtactttcagaccacagctgcagaggggatcgtggtgaatttcaatgaaaatccatttgaatcttgaggttcagatcttaaaaaagcaaaggacatgagagaagtaatattgttgcttgaaatttcattgcttatatctaaaagaaactcctatttttaagagaaatgttgaatctttgcaacgtggtagacgctcccacaaaactttctcctgaaataggagataaatgttggaaagaggcaatgtattgagtatgctgatagaggtggagttcagagacaggcaagcatacataagagtcaggatgtttttcagtattatctttacaaatgagtttcttacagtggtcaatgacaaaccaatttcattcaaagcttgcttcaataggcaatggtttgatgccaatatgttagctatttactttgaccaccgtatgcattaaaaagaagaaaaattaagaatactcaagcagaacctccaacttagatagcactttccacaaaaagtaatggagggatagactgaagttaaatgggatcaggtatgtgatgagatctcagaagtgtttgcacaataatgcagatactcattttaaacagagtcataaggattggaactaataaaaataatagaataaaataccgatcaagaatgtgtcctcctgcgtatctgggttttgaattctggctccacagaacttgtcagatatatgacattaaacaagatacttcan

SEQ ID NO: 21849 - DNA, 636 bp, Homo sapiens
  misc_feature 593, 608, 614, 619, 624, 632, 636: n = A,T,C or G
acgctgattgttgctaactgtcctccgggggaacttcaatttagtggtcagcctcaggtgtgtgccattgtaacaaatagcagttaagcttcatattgggtggacaaaagtttccacccactttcagacagttacaaagatatgtagctacactgagcataaaaggaggaaaattgatgaacactatggacagaaagcaggtgaattgctagaactttggctggtttgcttgggttggttgcttaaagattaaggaagaatggaaatagctgagccatcttactacttagtccctcctatagtctgtcatgccaacccttagatccctttggagatgacactaaaagtaatttcagagttcttttacagtggatctaagatgtgatagaggaactttggcaccctacgagagagggggctttccctcagacagacaaaactcctgcgagataccacggacaagatattaactcgtatccaggctcttacagctccacacgtgaaattacagtgctgatgaaaatgaccaacttgatactgaagaaattagatagagtgtactgtttgttactgcttctacatctgaatgtttnggtagggtattaggncctggnatttncaggnatcacttnaggn

SEQ ID NO: 21850 - DNA, 5010 bp, Homo sapiens
  misc_feature 1, 2, 5009, 5010: n = A,T,C or G
nnagatttggttgctgtgttccgggaagaagcaagcgcatgcgcacatgggcccccttcgtctcagctgtgcgggaacggccgagggtaacatcccgggctcgcgggaggctgtcggggtaatggccacacgctgacagaaccagccgagtggaaaaggggagcgaagccgttcctctgcacccttccccaggcctgaggccttcccgcttggtgctgccgccgccactgccggctgaggaggggcgatgagttggttcaacgcctcccagctctccagcttcgctaagcaggccctgtcccaggcccagaagtctattgacagggttctggacatccaggaagaggagccgagcatctgggccgagaccattccgtatggagagccgggaataagttcccctgtcagtggaggatgggatacttcaacctgggggttgaaatcaaacactgaacctcagagtccaccaatagcctctcctaaagcaatcacaaagccagttcggaggactgtggtcgatgaatctgaaaatttcttcagtgcctttctctcgccaactgatgtccagaccattcagaagagtccagtggtatcaaaacctccagcaaaatcacaacgaccagaagaagaagtgaaaagcagcttacatgaatccttgcacattggccagtcaagaactcctgaaacaactgaatcacaagtaaaagactcttctttgtgtgtttcaggggaaactctggcagcaggtacttcatcacctaaaactgaaggcaagcacgaagaaactgttaataaagaatcggatatgaaggtgccaactgtaagtttgaaagtatctgaaagtgtaattgatgtgaaaacaactatggaaagtatatctaatacgtctacgcagtctctcacagcagaaacaaaggacatagctttggaacctaaggaacaaaaacatgaagacaggcagagcaatacaccttctcctcctgttagtaccttttcatcaggtacttctaccaccagtgatattgaagttttagatcatgaaagtgtaataagtgagagctcagcgagctcgagacaagagactacagattcaaaatcaagtcttcacttgatgcagacatcttttcagcttctctctgcatctgcttgtcctgaatataatcgtttagatgatttccaaaaactcactgagagttgctgttcatctgatgcttttgaaagaatagactcatttagtgtacagtcattagatagccggagtgtaagtgaaatcaattcagatgatgaattgtcaggcaagggatatgctttagtgcctattatagttaattcttcaactccaaagtctaaaacagttgaatctgctgaaggaaaatctgaagaagtaaatgaaacattagttatacccactgaggaagcagaaatggaagaaagtggacgaagtgcaactcctgttaactgtgaacagcctgatatcttggtttcttctacaccaataaatgaaggacagactgtgttagacaaggtggctgagcagtgtgaacctgctgaaagtcagccagaagcactttctgagaaggaagatgtttgcaagacagttgaatttctgaatgaaaagctggaaaaaagggaggctcagttattatctcttagtaaggaaaaagcacttctagaagaagcttttgataacctgaaagatgaaatgttcagagtgaaagaagaaagcagtagcatttcttccttgaaagatgagtttactcaaagaattgcagaagcagaaaagaaagttcaactagcctgcaaagagagagatgctgctaaaaaggaaatcaaaaacataaaagaagaacttgccactagattaaatagtagtgaaactgcagaccttttgaaagagaaagatgagcagatccgagggttaatggaagaaggagaaaaactttcaaaacagcagctgcacaattctaacatcatcaagaaattaagagctaaagacaaggagaatgaaaatatggttgcaaagctgaacaaaaaagttaaagagctagaagaggagttgcagcatttgaaacaggtccttgatggcaaagaagaggttgagaaacaacatagagaaaatattaaaaaactaaattccatggtagaacgccaagagaaagatcttggccgtcttcaggtagacatggatgaacttgaagaaaagaaccgaagtattcaggctgccctggatagtgcatacaaagaacttactgatcttcacaaagccaatgctgcaaaggatagtgaggcacaggaagctgctctgagccgtgaaatgaaagctaaagaagaactttctgcagcattagagaaggcccaagaagaagcccgtcagcagcaagaaacattagccattcaagtgggggaccttaggcttgcattgcagcgtacagaacaagcggctgccagaaaggaggattatttacgccatgagatcggtgaacttcagcagagactccaggaagcagagaatcgaaaccaggaactgagtcaaagtgtttcatcaacaacaagaccattgcttcgacaaatagaaaatttgcaagcaaccctgggatcccagacatcgtcgtgggagaaattagagaagaatctttctgataggcttggtgaatcccagaccttgctggcagcagcagttgagagagaacgtgcagctacagaagaactccttgctaacaaaattcagatgtcttccatggagtcacagaattctcttttaagacaggaaaacagtagatttcaagcccagctagaatcagagaaaaataggctgtgtaaactggaggatgagaacaataggtaccaggttgaattggaaaacctaaaagatgaatatgtaagaacacttgaagagacgaggaaagaaaagacattgttgaatagtcagttagaaatggaaagaatgaaagttgaacaagaaaggaagaaagccatttttactcaagaaacaataaaagaaaaggaacgcaagccattttctgtttctagcactcccaccatgtcacgctcaagttcaataagtggtgttgatatggcaggactacagacatcttttctgtctcaggatgagtctcatgatcactcatttggaccaatgcctatatcagcaaatggaagcaatctttatgatgctgtaaggatgggagcaggatcaagcataattgaaaacctacagtctcagctaaagctaagggaaggggaaatcactcatttacagctagaaattggcaatctagaaaaaactcgatcaataatggctgaagaactagttaaattaacaaatcaaaatgatgaacttgaagagaaggtgaaggagatacccaaacttagaactcagctaagagatttggatcaaaggtacaacactattctgcagatgtatggagaaaaagcagaagaggcagaagaacttcgattagatctcgaagatgtaaaaaatatgtacaaaactcaaatagatgaacttttaagacaaagtctcagttaacttgtgaaaattgaattcccatcaaactgaatgtaagcatttaatatctaaacatttaatgtggacttccaataaattcttttatagaattagaaagtgggatttactgtagagtgtaaaaatttttttaaaattgttttacactatgtagtaatatttacagttaaattattttgtgcaatatttgaactttatttttgaaactattctttaaagatttattttttaaagcattcattttttttccttgaatagcacagagatttattactttatcctcatataaatatggctagagaagaagaatggtgttcatatatgtattgtagatatacaactagttgtatctataatttgtaagtgtttatatatatattaagaacatttgaagagtaatgttaacatactgaaactttgaaatctttcacatttaaaatttcaacatatcttaattactgctcatgaaaatgtacattaagtgttaaagtaaaaaattattaaatctgtggctattaaattttaaactaatttttttcctttaaaagtaagagtcacactgacactgtctgaaatttaaagagtgaatgatttaaacttaaaaaaaattttgatctgaaaatttatttcacccagctttcacaattaagtctgtataaaatgtggtaccttttggtacctatccagagaaacctgtacatattcaatgttatctagatgtgattggataatggagaaaatttatttataatgattttgcaatggcatcaataacatttaaatgattttgaagaagtattattttactaccctataaaatgaatcgaaaataataaagttcttaacataatttactctttaaaattcaccgtggttcatattttgtaaacccatatttttagcacattaaaaatgaatgtttgatattacagaatattcataacaaaatggaagaattataggaattaacttgaatttggcatttttaattttgtgatttatcattttattttttcttgaaatttcaaacacaaggaaagcatagaatagcttttaaaagtagctatgccttcttccaaatgttattttattcaaaaaggtaaccaggttgtgttttaaacctgtgaaatattgtgatgcattttattactgaaagttatttaactgcctttacttgcacataaaaactctcatttacggccaggtgctgtggctcatgcctgtaatcccagcactttgggaggccaaggcgggcatatcacctgatgtcaggagttcaagaccagcatggccagcagtttggtgaaaccccatctctactaaaaatacaaaaattagcctggcgtggtggtgtgcgcctgtaatcctagctactcgggaggctgaggcaggagcattgcttgaacctgggaggtggaggttacaatgagccaagattgtgccactgcactccagcatgggtgacagagagaagactccgtcnn

SEQ ID NO: 21851 - DNA, 2349 bp, Homo sapiens
  misc_feature 1, 2, 3, 4, 5, 6, 7, 8, 9, 2283, 2348, 2349: n = A,T,C or G
nnnnnnnnncatcccatctcacacgtaccgctagccagccgcggttgaatcggacggggagcaggtaaagatggcagctaccatgttccgggctacgctgcggggatggagaaccggtgtccagcggggctgcgggctacggctgttgagccagacccagggccctccagattaccccaggtttgtggagtctgtggatgaatatcagtttgtggagcgcctgttaccggctaccaggatcccagatcccccaaagcatgaacattatcctacccctagtggctggcagcctcccagagaccccccacccaacctgccttactttgtacgacgctctcggatgcacaacatccccgtctacaaggacatcacgcatggcaaccggcagatgactgtgatccggaaagtggaaggggacatctgggccctgcagaaagacgtggaagattttctgagcccgctgctggggaagacacctgtcacccaggtcaatgaggtgacaggtaccctacggatcaagggctactttgaccaggagcttaaagcctggctcttggagaaaggcttctgaggcccagccgagcagcctgcttgtcagcatgccctgtggatcaagtctagggggcctcaggaggagggaggtgggtgttggagcccctgagacaggggatacagaaactagggctaaaggactttggggtcaggccttgcttgcataaaggagaaaacaactctatgtacatgctgggggagagtgcctaatgtgggagaccaaatagggatcaccaggctaatggggggcgtcagcagctttctctccctcctatcttggcctgttcttttttgttttttgagacggagtctcactctgttgcccagggtggagtgcagtggcatgatcttggctcactgcaacttccacctctgggatcaagggattctcctgcctcagcctcttgagtagctgggattacaggcgcccaccaccacagcctgctaatttttgtatttttagtagagatggggtttcaccatgttggccaggctggtctcaaactcctgactcgaagtgatccgcccaccttggcctcccaaagcgttgggattataggcatgagccatgtgcctggtccaccttggcctgttttgtttttctttccttgggctcagcaattcaaattctagttgttatttggtggaagcagtagcccaaccccagtttaggggaaggtagcacagggcagagccactgggcactttgtttccttggccctccgaagctcactgttgcaaatacccccaagcctttgctctaggccagatcttgtttggtgcaggtgatggagaacacagatgactcgggcatgggtcttggagatcttctgttcaaagtacagtgctggcactggggcacagagtgcccacgttagccccgggctctgatagagaggtaggaggcacgttcttggtcactgttccattgcagaccagacttgctggcctgaccacaagggagtggctgggaactcacagccagcatagggacatccccctgcagccttctgacctgcaatcaaggctggggaggggtttgcaggcaggaatatgctgacctttcaccctgccatcccatcccaaccccagctcactagccttcatatatgccttatacttggagtcacaggggccaaaggcctgagaccccaccctgcccccaaactggctaagacagctttcagttcctgactccccaacttggtctctgccctgaagcagggcactgaactctgggctgcttctctgtgtgtaaaatgggcacatcttcctaatctgttaatggtcagtggtgtccccaaggatagtgctggcttccatggaaaccctcactcctggagattccattccattttcaagtgtacagccacagcaaggagcccgacactgatttgatcgattctgtgacacaaaccccaccaattgttaatgcaagtttttatttggctgtatatacaatttaagctattaaaatttgtacaatatttacaaattaaataatcatctgaaaaaaaaaccaacaggggcggcgccccccaaaatctcccaggggcccccacacgccgcccccacactgtacacaacacgggcgccacagcagcgccatcaacaacaaaccgcgccgcgtcacacacgccgacaacccgcatgcgcctatcagcaacaccctgcgcggcacggccaagcacccaacaagcggtgccaactacgatgtgtcgtcctgcagtnagcacaatgcataatcgaccaccaccgccgcacgtatcactagcgaatcatcaactcaatagcann

SEQ ID NO: 21852 - DNA, 875 bp, Homo sapiens
tcgacacgctgcgagaagacgacagagggggggcgcgagttggactgtgaagaaacatggcggccgcgacgttgacttcgaaattgtactccctgctgttccgcaggacctccaccttcgccctcaccatcatcgtgggcgtcatgttcttcgagcgcgccttcgatcaaggcgcggacgctatctacgaccacatcaacgagggggtgagggcctgtgccatccctgaccttggacccgcctgaggggtgacagtggagtagagaagctgtggaaacacatcaagcacaagtatgagaacaagtagttccttggaggcccccatccaggccagaaggaccaggtccacccagcagctgtttgcccagagctggagcctcagcttgaagatgatgctcaaggtactcttcatggaccaccattcgctgttggcaagaaacggctttacttacaaaacagactctttaccttctgctgtgtttgaagtatgtttagtcagcatgctcaggaaataaatgtgaattgccctaaaaaaaaaaaaaaaaaaaaaaaaaaaatttggggggggccgcgcgcgaaaaatttttaacccatcctcgggcccgggagccaataagtgattgaacatttggcgcaacgcggggcccaaagaaccgggccagacacggggcgggggttcccccaaaaaaaaaccgcggcggcccgcggtgttcggacaacccggggtgcgcggctacacggctccaccaggccacgagcgagccccccgcgcgtcggcggacaaagaagacaaacagacagaacaaaagaggcaccaaaccacacgcgagcgaggacaaagaaaaacagacaccagaaaaccactgaagagcaca

SEQ ID NO: 21853 - DNA, 613 bp, Homo sapiens
  misc_feature 1, 2, 3, 4, 5, 6, 7, 8, 9, 10, 11, 12: n = A,T,C or G
nnnnnnnnnnnnagatcgattttgtagttccccagtgttgtcggcaactagctttaatctgtttaattcagtgaatgaagactccgtggttgaccacttattcattagtgacttgcagcatgacaccatcgtgcaataggaaaaaaagagtatctgaagaagtttatcatgtatgtccaaaagaatctaagcaacttcagtggtggtgttaggatcaaagaagagtcattagtgtatagagtaagccctgagtatcacattcctctgtaaaggcaatatagccgggcgatctacctcatcagatctaagggatgtatttcaacagccaacgctaccaactttctcttcagggtaagacactgaactaggaattaccacatttaacccacctatttagtacacataatgtatatgtcagcatctagaaatgaatgaataaaatggcatcccaaatgttttgggagatgaagaggggcatttatgataataaaagggggcaagccaggtgtggttgttcatgcctgtaatcccagcactttgggaggccaaggagagaggatcacttaggccaggagttttagaccagcctggctaacatggagaaaccctgtct

SEQ ID NO: 21854 - DNA, 1397 bp, Homo sapiens
  misc_feature 1, 2, 3, 4, 5, 6, 7, 8, 9, 1383, 1384, 1385, 1386, 1387,1388, 1389, 1390, 1391, 1392, 1393, 1394, 1395, 1396, 1397: n = A,T,C or G
nnnnnnnnnatccatcccagtgatgccttatttgaaactgggcttaaactgcaaaaagaatgaagttggatttaggaagctgttagatcattgagtggtgttgagagtgaagtttcactagcagggaagtttccttgagcctaaaataaaaagaaaaaattaaaaagaatcagtttttttaattaaaaaaatagaaagctgttaggctcctaattcgtggggttttttttgtaaaaacagtttagataatcctgaatgcaatcattaacttggttgctaattacaagaatgaaaattataatggaaaaggacaaaataatataccagctggtttgttattatagtccgtgtattaaaatactattgaaatacgttaaaggtaaatttttaaggtttaaaaaaaatttagtaacttacagggatggagaatttagatgtcagaggtggggagatttatttttataaggtaatttttatcctgataaggacttaaaaaaaagttttgcaactgaaattttaaagtaaacatgttaagtacagttaaaaagtaagcattgtagtaaatagtggattctctggtgtgtattttttatctcagtgttgaaaattggaaaagaatggactgaagtctaaaaactggaataatgaaggacactaaatgcctttattgtagatactatgtttgtaagtctatagctaagcaacttaagccaaaaaggtctttcaactgaagctttaatcaacttattttggagatgttctcttcccttatctcatgcgtcatccctaaaataataagatacatgggatcaaatagcccttgccttttcaacacaaatcagttggaaaattatggtttgagtcctgttgctgccatggcttctgtttctcagaaatgagtgtgtatgaacataccaatctatgtaataggctacctttttttgtcttctttggaactttgtacacaaaccaagacaatatcagggtgacaggtgaatgaacttaaattctcagtcttgtctattcaccaaaaaagtatactgcctgttttttctttaattattcaaggttgatgacttttaggaacatgttttatactgtattttttaattaaagcaagtgccttgatgtaattccatgtaaatcattgcttaaccctcttatgggatgaggatgagttattaatgtattgcagcctactggaaaggagggggagttggttaatagcagatacttttcttctagaagcttatgttttatgctgtttattatgtaagatcctgtatgtgtgttgagatttagaggtttcatttgttttgtctgctaataaattgttactctaataatacaaaaaaaaaaaaaaaaaagggaaaaacaataaannnnnnnnnnnnnnn

SEQ ID NO: 21855 - DNA, 2725 bp, Homo sapiens
  misc_feature 1, 2, 3, 4, 5, 6, 7: n = A,T,C or G
nnnnnnncacttggttttcgctgttcgctttttttctccgtctgtgctttattgtgcttcggtgtctgttgtctttgtgtcttcgtcttttcttgtcgcgctccgtttcttttcgggtgtttctcgcctgtccttgttttttctgctctgtggtgtttggggcttgtgtctttttgggggacgtatgcgcttcgtttttgtgatgctgtgcggactttctcttggttgccgtgggggccgccttgcttcttctatttgtattgtgcacatgttatttcggtgccctttgagttacgtatgtcactcaaagtaacatattgtcaatctcccagtatgtagatgctaggattcccactacttgttcaattccaggcataatgtatagcactttatttcttgcagtgttatcactagtgaggccagaaaatggttctttatttcctattgggagccgatgagttgtgggtaagacttgagccttgaaattggattagacacatcgttgtagtgatatgaaggttaatgtcttacttcatctcctccttgtgaaatatcaagtatatggggttgataacacgactgaggcacaagggcaaagggaggttcacgccgattgatttctttccttcaatagttaacctttgttgaaaaccaccaataaatatcacttacattagggaggcaccatggtaaaattaatgtctacttcttatatttaaaaatgcagggataatatttctgttgcacctttgtatcaatagtcaactgtagtgactgtctttctggccacagcagaagaaaaactgagggagataaagtcaaaaaggaaaagcaagaggcatgagcttggtgcaagacatgtgaaactaccttgaaaacatttcctattctcttgtttacaaaaaaacaggcaggtcacatcacaccattaatgcttcctttccttattttacatactgtagtcactccttattttaaccttgaggctgattaaaaaaagattttaggagaagggtaaagaactaaacttcaacatgcctttaaaaacaaaacaaataaacctgacaggttcaaggtctctcacatttcctcccttgcaacatctcttggctgttagcaggacacagatacacagggaagggagccgagctggctacagcagttactaagctgccgagagaggggacgggaatccttccattgactactcgataagccaagcccaaaataacatcccaacattgcacatgtggttatctgtactgatggaagttttatttcaaatgtaataatactcttcaatagatggggtaaaataaagattgttttcctccccactccccaaccccccagccaaatgaaatggctttggttatgtttctttactttttttttttttttttttaatacaaacaacttggggaaggtagataagtgcaattgggagggaggattgaacttgaatagttaaaacgtgaagcctatgtgatttcttactttgggaagaggagcccccttgttatcaatgagaaccaaatcgagcacagagtacaaccattcttacacggacgcatggaccaacttcctacttccaatgttctctagactgttcaagatgcctttccctcggtttccatcagtacctgggagggaagaatgggcgttttggtgcaaagaacggagggcccctagcaaaaggtggcctgggtctctttaaactgtgaaatgggtctctgctgagaaaaggttccctaggccgaaagtctggccggggactccgtaagattataccactccggctgatggtgtctctgtgtgagggacccaagggggggccactgctgctgttgctgcctcccccacctcctcctccatggggtgggcccaggtgttccagagaatgggagggtagggtgaggctctctcgtacacggctaaggccagggccgttgaggtcccgttgggtggggcccccgtggtccctgggtcctgggagtaccccaaaatgctcagccagggtcccttgaaggagggaactatggtccttgggaaatactgccacagcccctgccactccgtgctctgccagtggtggggctgggaagggtacaactccagagtggtcaacagggggtggaggagggggtggagtagaaaaggggacaccactcccaccactgctgctatgttccccaggagggggaggaggaggtggggtagggaaaggaattccactgtgctctccaggaggagggggtggggcagcatgggccagggctgcctcctttgtgaaggggttcgaaagatccacagagggtagatgagtgggtgcatctcgagagaagataccaccatgatccttaggagggacaggtggggcagatgatggccccactggctctctctggaagggtgtcccatgttccaagggggatgggggaagatgatgctcaaatgttgagttgaaactgttggaacgaaagctgccgacactctcctgaaattgaggtgcccgttccttgtatggtgctgttttaaagccagtgaggcctccgctgcccccacccccaagggatgccaactcagaggcacttgaagggccattgtcaaaagagctacctgatgtgctcagatcaaaccaacccacccttgaagcctcacgcccatgtcctctatttcccttcccaggaactcggatggactctaccggacgcgtgggcggacg

SEQ ID NO: 21856 - DNA, 3407 bp, Homo sapiens
  misc_feature 1, 2, 3, 4, 5, 247, 3407: n = A,T,C or G
nnnnnatgtgaggcatttgggaatgtctcagttaacgtggtacataagttccttgctctaatagagctcacatttggatgtcttctaattctgaacctgaatgtaagagcacaatacaatcaatgaagcagtgagcccaggaagccatggatcttcacaagcctcaggaaaagtcaacatttaaaattttctgtttaaagtccaagggcacagcaagctcttggtctatatgggaaggccaatggantacaattcccacaagtccgtgcgacctctccgttctgcgcagcttcgcggtatgaggaagagggtcctgtcaggcgcactcttcttgcatcatcagcgtgcacctccacgatgaaacaggtctgggctacaaaagtatggccgcttctgaggcggcggtggtgtcttcgccgtctttgaaaacagacacatcccctgtccttgataactgcaggaacggtccgcagcaatggctgcgcaccccgtcagcaagggctgcagccgcggcggttgcggccgcggccaggaccggatccgaagccagggtctccaaggccgctttggctaccaagctgctgtccttgagcggcgtgttcgccgtgcacaagcccaaagggcccacttcagccgagctgctgaatcggttgaaggagaagctgctggcagaagctggaatgccttctccagaatggaccaagaggaaaaagcagactttgaaaattgggcatggagggactctagacagcgcagcccgaggagttctggttgttggaattggaagcggaacaaaaatgttgaccagtatgttgtcagggtccaagagatatactgccattggagaactggggaaagctactgatacactagattctacggggagggtaacagaagaaaaaccttacgataaaataacacaagaagatattgaaggcattctacagaaatttactggaaatataatgcaagtgccccccctctattctgcattaaagaaagatggacaaagactttcgactttgatgaagagaggtgaagtcgtagaagcaaaacctgccaggccagtgactgtatacagtatctcccttcaaaaattccagccaccatttttcacattagatgttgaatgtggaggaggtttttatatcagaagcttggtcagtgacattggaaaagaactatcttcctgtgccaatgtgctagagctgacccgaaccaaacagggaccatttacgctagaagaacatgcccttcctgaagacaaatggacaattgatgacattgcacagtctcttgagcattgctcatctcttttcccagcagagttggcacttaaaaaatcaaaacctgagtctaatgaacaggttttgagctgtgaatatataactctaaatgagccaaagagagaagatgatgtaattaagacgtgttgagattggcctgggaatatcatcattttctagttgacatttgaatcctgtgtgcagatgcagaatgacaagctgcattcaaaagacaaacaatatgtcttttttttttttgcatgaagaaaaatgtctatcatttacagtttcaatagcacataatttattttctatgcattataaatggccttgcagttggctcagttgtttgctgtgttgtgaaatgttttaggattttttgtattgtgaaaatatgaatatgattggattcagaaaaattaactttctgaatttgatctgtcttcagtcttgtgaaaaagttgaacaaatttcctaatcaaagaaaaaagtatgagctccatgtttctttagtttcacaaaaatgaccataatttagtgttatttttactttatttaggcttcctggtggcttcattttattgaaattctttaaattgtttaaagtggccattattgatctctttcttctgttttggagagtttattattaaaaacatttctttgataaaatggccatcatctagtaatacctgtgtttgtttagatcttggaaatgaataagctttgataatatttgtaaatgaaccaaattattactgctaccactaacaggttgtaaatagaagactaatacttaattaaagtcaccttcctaccattagagcagaagacagctcctatagttttgtattttggcagctatgagatattttcatggtaatgtcaacatggtcaagcactttgtaccaagttattaagtaacataatttttaaaatttaaagaatgtgtcttcaactaaaaactttattctttagcatttatttatatttctctgtagggtgttatccctgtgacattgtctctttagtttgctctttcaagagatacttacagatgttgagatggctgccctgcatttccagctaatctcttctgctctaaatatttaaaaacagttcttctcaaacattttcattcagatagctttctgaaagttccctatccctctttaccataattttttaaatgtagccacattgtaatagtaaacttcatatataatgagtgcttcatatttttgttatgggaaagcaatatattatgcagccagtctgtagaaacattcagatccctcttcctttactcaaatacagtttcaaaaggaagactcatgagaaatttcataaaatacaagtttttagatgtttatgctttgcctttctttttaaaggtgttttcctgctttgtagtctctaactctgaaatttaaaatatgtaaactaaagtggttttatttgtgcttaacccaatttaaactcaatgtaaaatgttatatatgcatcagtacagcattttcaacatattggcaacatattttaaatgaaaacactaaaacaattcttagtatgagacaaaactgtaaggaaaaagagtgttaataccatgatgcattaacataaaatatcaaacacacaaagtcataaaatgaaaatttacagttttacctgttcatatctagtgccccacagtgtgtgtcaaccaaaggtggcagtggctacatctgcctgttggactggtacaggttacaatatgtcctcttccattgcaaattaaagtccaaatagagaaatacttaggttttagaacacatcagaggtatttctgctgtatttttcaccttaaaaatgacacagagttactaataggagtagagatgttgccttttaaaacgaatgccgcctttcctttttggttaacccgatggttggcccctgggaatacgttcccctccccttaatgtgttacttgagaaaggtaataccaatacgctcggggcgcctagtttagggcccacctaatgggtccgataatcactagagtggggacagcagtctaaaatatccgataatgtttgggcagcaaataaccggggggtaaaccgatacgccgtcgtgacn

SEQ ID NO: 21857 - DNA, 3568 bp, Homo sapiens
  misc_feature 1: n = A,T,C or G
natgcattgtaactcctgggtggtgttctggattttttatccttctttcttttttcatctatctctttggatctgtctttttctcgttccttttctttgtcctgttccttttccttctctttgtctcgatccttctcatgctctttttcccgttctctctctctgtccttttccttgtctttttcccggtccttttcccgttccttgtcccggtctttgtttttaccccgttccttttctttttcacgttccttttccctctctctctccttttccctgtctttctctttcactctttccttttccttgatcttttctcgagtgtcttttctcttgtcccgtgaatgcgaacgactccttgacttccgtctctcccttgatttagagcgttttttatgtgggctcttagatctacgtctgtctttctgtcttgaacgtgatctattatgggatctactcctgtgttttgattgtgatcttttccttctagaatgggattttgagctagacctggattttgagcgagtatgggaacgagatcgaccgccttttctttcattgctctttccagactctggttcaatagctgctgagataaatgactgagcttctcgtactcgcttcattacttcttctaactccttagctgcagcctgaggtgtcatctcagggggttttactattgcattgttggagtgatttattttcagtggcctgtctccaaacataactccattaaaagcaagggcccttggtacagaattttggtctgcaaattccacaaaagcaaaccgagttggctgagtctcatcacctgccatccgcacaaacttcacttctccaacttgtttaaaaaattcaagtagttgatcagctgtcgttgtctgggaattcagatttccaacataaaccgttctcctaatttcatctattttggaaggatccacgtttcccataagtggtggctgtggtatctctccaagtgttgcaatgttggggtctagtgctgctgctggtatagctcccaaactgctaagtgaaacaccaagagtagtcaaaggatttggggtcggtattggaagcaatcctgcaccaggcatcagacttgtcatggttggagcaggagccaataaagagagggctttggattcctctgggattttacctgcagaggcaagttccaaacattacaaaaagcagaaacaccacacaaactttacactatgattttacaattacccttgcagttaaaaaataataataataaatgaatctatctatcagatctgtataaagaaataaataagaacttaagtctttccttttatcctgctctactaggaaaaataaaagtgagcaaaacttcaaatattaacaatctcattaatggaatattattttaaaaattgaataatgtagacaattatttaacactttgagctatgggtcacctgtactggaaacttaatgttcatgaaccaaacgatatcaagcatggacgctttcccaggacggtgttttcgcggtgatcgaaagttgtgttacacatgacaaccgttcgtgttggctgcatcactaatagcacacagaacatcagatacagaaaagaagaacattttttaaagtttaatccccagaaatggcaaataaccaaattagtcaaaaaaaagaaaaagaaaaaacaaatatgtgcgaattgaaatttcttaatgagtgcccctatcctgttactgaaactacctatttgtgatgcaaacaattttgataaccctccaacagattccatttaatttcaaatagaaaacaaaaacttactccatgtaatcaacttcaacgtaaaaggaagcctacatccattcagttaataaagcatctcaccaacatcagagatgcctaaaagaactcagttccaaaaaatatgccttgggaaactactaaaaatgtttcaggaaaaaaaaagttccctggtttcagaaaacttcttattaacttttagaaccaatttatgtatacttatctgaagggggaggttaatgccttaaagcttgcttaaaaacattttaattgcctaataacaatagtaacattaaaataatctaataacactcagtaggaaaaaaactccctacaacctaaaaaaatgaaaaacttactctgaaataagtacgatttggcatattcattgctgaattctaatcaattacttctgataaggactgcaactttcacattatttttccttatccccttaggcaaaaaaaaaaaaaaaaaattcttaaatagttgactacatgtggatatatttagaagaacactcatgtggtagctggtaaagcatttctattattaattctccaaaagtgttttaaaagacaatgcacaaaatcatgctaaactgaaatatagcatatgcagtaaatttccacaagcaccatgcctggtttcagttgtaaaaatatttaaaacaaccacatgtgcagagagaaatccctaaacaatattatctgaatatatctttaaacatggatggaactcaagttggaatttaaaacttgatttaaataatggctatgccttatttataggaagcaaataaaacctactattttctacctttgcagcatctaagtttatattactttattactttcaaaaacaaagttatctttattatttcagtgaaaattctggagaacagatttcttaacatgcatcaacaaaaggcaggtaggccttactgaaaacatcaaataacaataatctgctttatatgtattagttattggtattaacacatgtatttatatatacccacatatacactatactatttatattgatttcacctgttttatctgttataaattggtattatctcaaaaggtttgtaaaacctgaacattcttgataaattgaggttttgaggcagaaactccatcgtcactaccttaatgtatgcacctaaggaaactcagagttctaatctagtaatgtcccaaatttaatattacttgtcctttaataagtaaaactacctattgaagacattgtagaaagactatacaaacaaaaagggtattcaacactggccaaaagttgactacttagtattatgaagtctttcactttcagcttaagtatcagtaggttgtcaaactctcccactgcctttcaaaagagtatactactataaatatagtatactactataaatgtataaatccactataagcacattttttaataaattaactttcaattaccattctaattactctatatacttattctaattacctaaaggtaatggcaaaagtactttaagaaaaagctccattgcttaatttccaagatagaattctaccaaatttaccctccaaataacagagcttataaaagtataaaacaaataagcatttagcatttttcccaaactatactcctcaaagtcaactgaggaaaacatctctcacagtattatagtcctaatctcagaatccatttagaagctagtaacctctgaaaaatattcaacaaaaaattcaagctaacaaaaaccggacgcgtg

SEQ ID NO: 21858 - DNA, 428 bp, Homo sapiens
  misc_feature 426, 427, 428: n = A,T,C or G
acgcgggttcttagttcttttcaaccagttctatgtggaaagaaaggtattttatttgacagtgatactaacattgaaggagtgtttcctagggcctggctcccgccaagcatctatgggcagcaaatgccctgtttgtccctcacatcagccctgggcagatgtattttcccttttcctgttttactgatgagggagcttaaaatttagggagattaaggacctccccaagatcatagagtttatcaccaatattttactgactctccataatatagagagctcttatcttaaatgaattggttacagatgtaaatttgccaaaatggaggtgatttatttaataataccaagtctcaaatgttggaggttttaactttgaattattgacttaacctctagtagaatgttatgatgccagtgtannn

SEQ ID NO: 21859 - DNA, 5663 bp, Homo sapiens
  misc_feature 1, 2, 5662, 5663: n = A,T,C or G
nnctggcattgcagtgcgggccgtgcgggctgcgcgggcgcggggaggcgcgggcggcaaactgcgggcacccggcaccccgcagccagtaccgggcggaggcgtcagagccgcgcaccgcggacgagcaggcccaggcatccagtaccctgctgactctgacatgcccccagcctcccccagctctgcagggagccctggtgccagagaccttctcccatttctccctatgggtgcctgacctgagggcagagacatctgagtgtgtataagcacagcaggacaccaggacctggcctgaagacatttcctctcctcccctctggatttctcagagactgttctgcgatgaccacagcaaggtaccggcccacctgggacctggccctcgacccgctggtgtcttgcaagctctgtcttggggagtacccagtggagcagatgacaaccatagcccagtgccaatgcatcttctgtactctgtgcctgaaacagtatgttgagctcttgatcaaagaaggattagaaaccgcaattagctgcccagatgctgcctgccctaaacagggccacctacaggagaacgagattgagtgcatggttgcagctgaaattatgcaaagatataaaaagctacaatttgaaagagaggtgctgtttgatccctgtcggacttggtgcccggcgtccacctgccaagctgtgtgtcagctccaggacgtggggctgcagaccccccagccagtgcagtgcaaagcctgccgtatggaattctgctccacctgcaaagccagctggcaccctggccagggctgcccggagaccatgccgatcaccttcctccccggggagaccagtgctgctttcaaaatggaagaagatgacgcgcccatcaagcgctgccccaagtgcaaagtctacatcgagcgagacgaaggctgcgcgcagatgatgtgcaagaactgcaagcacgccttctgctggtactgcctggagtctctggacgatgatttccttctgatacactacgataagggaccctgccggaacaagctgggccactcccgggcatctgtgatctggcatcggacacaggttgtgggcatttttgcaggatttgggctgctgctcttggtggcctcacctttcctactcctggccactccctttgtactttgctgcaagtgcaagtgcagtaaaggtgacgacgacccgttacccacctagaggaagcgcgatgctggaacacatccctgcctccgggaagtgtggctctcccccaaccctccccaccgtccccccttcactaaacatctttcttgccttatgtgccccattgagcttcacagtgtcaggctggacgccgtgatttcagggacctatgtcacaatgttcgctgaggccccaggtgtggtggggaggggaggcaggtgtgggtagcgcacatccccacagatcaatctctgcagatgacagggaggtgctgtgagaagtgcaccaggcagctttctctctgtggtagactaggcatgtctggggatggcctaagagactttctgctccttggcttctagatggcaccatgttgtcagagaagtcttttaaggactgccactctcttcagacagaatctgattattccagcttgagagaagcactctgtttatgacaactgtttttattactaatggcatttagtaaaatcctttttagaaggtattttttttccaactgagtagtgaaaatcaacaaggtgcatataaaccatcctatgcctttcttgaaatgtgcattttaagaagttatagttaaacgacttttcaggagatttagaaagccttatgcactctttgtgtttttcttgaaacttgctgtagtaactttttgaacgctgtaagctgtgtactgttataagtgtgcttcctatattgttgcatttccttgataatattgacgtgtttaaaggaacatctcatctccattagatttgccttttgttgttttctctctttggtgattcagctcagctcatgggcctcatcccttctctcccaggtagcagaaaacgctttttattgcattcaatcccactgctttgctcggcaatggttctcctccgaattgctgccgtctggcctctggcctcagtcttcagatagacagtaagaagaaagcagcctcattgatccgcagatgtaggggcctcttggcagaggctggaggactctgggggctagggaagagcctgccagattttcacatttttaaaatgttctagtcattttgagaaatcatatatcttacacagttccaagtcctgttgctaaccgttttgctcttgttggggaaaagaacctcccatttcacttcgttttaacgtggggattttaccacttgatcttttacagggctgtctgtgaccatttccatggcagcaggatgcagggattaataaggacacatacacattattccaccaattgactttgaaaagtggagaaagtgtattctttaaagagaatttacttctaaaagccacaggtgcttttacaaagcaaactgcattgaatttaaaacttctaaaaataacaggcaaatattgtagctatattacagtgggattttaaaaatcttgttaaacattctataaagaagtaaaacaaaatccttttatctcagttatttgcccatcacaagcacatttttaaaatgttgctttgtgtgtgtttgacttctgcatttgagtatcagtctcaggtcctagtttactttccctggttggaaatttatttcttatttcctaacattgaattcgttagaaaaaacagcgtcacctcactcttcacctgtcatgttgattttccttatgaacccgaagccatttagaaaatccctgtgtgtcaaaattacattcaaaaagctctccttgtaattgcaagtttagtaactcagtaagaacatgcctgcgactccctttctggatggaacctgggctgtggctctctgtcgtttgtggtgctgtgatggtgtctactgttagaatagcttttctggaggtgggtggcaactccacgcgggagtcattggctgggcttgagccctcagcctgtgatatgtggatgcagctgtccagccactgccctttaacatgcccagcacacatgggaggcctgtggccctgtgtccagtggcccacaggacacgcctccaccatatgctcatccttcctgcctgaaattgctgctgcccatcgcatgagcccacacagtagcacccccgtccttaggatgagagtcagagcctttggaaaggctgcatccccagggctagagctcagatgaccttatttctagagggacaggctgttctgttggaagagtctctggcccagtcatgcacatctgtagccccagccatccttgtgccttcacctctgatgtgtttcacaagcacgtagttcaacccagatagggaccacagagattctggggccagccaggggcagtcaaattagcacctactggctctgactttttgtatgaagcatgcctcagtttcctcattttgatctagatataaaattaaaattgtccatttcctatataaataccagcaagatcactctgagatacataaactcgcatttccttctgttttagtaaggagtgccagacttatctttgatgggaatacagtatgaaccctgcttgatgtaaaatggaaatagcacacaggcagatggccctgggtttggactttgatcttgccatcattccccagtaaaacctggggagttctgcgttgagtggacggacttattcctgtgaagcggcataatttgtctccattgaaaaatggcattcactcttacagatggtgttcactgcaagccccagaagcatatggcatgtgttcactaagaggcctttaatcctggggagtaaggggcgaaggcccttagacaaccatggctgctgtactgccgcccagggtgggtggccagtgaggactggccttagcccagtggacctgtggcttctctgaggcccttgagtaactgaccacatttggaggttttgctggaaatgcctgacctctcagtctggctctgctgtgtagtccatagcccagccagatgagcttgcagcctcataggaggtcagcaccttgcaaagatgcagtcaccatagatgtccacgtagcagagactgacttaggatctgagataaagcatcggattgcaggaataactgtccaaattagttcttcctcctcaactcataggagtagctgtggacagaggaaccaacatctgccacctctggcattttctttctttttttttctttttgagacggagtttcgcttttgtcccccaagctggagtacaatgacaggatctcggctcactgcaagctctgcctcccgggttcaagcgattctcctgcctcagcctcccaagtagctgggattacaggcacccaccacctcacccagctaatttttgtattttcagtagagacggggtttcaccatgttggccaggctactctcaaactcctgacctcaggtgatctgcccacctcggcttcccaaagtgctggaattacaggcctgagccaccccacccggcctattttcttaaaggggaacaaatgatcttgacaacatattattccataaaaccagtttagggcacaggccagttcctgattagaacacaggacctgtgggagggactatcagagatgcaaaaattacttcaagatgagtttattgttttcatttgtattgcaaaagttagaagtcattttacaaattaaaaaaacatttttttcttggtagtctttaaaaattaggggattgaaaggatccaggatgggctttgtgtgtgtgtctcagattctcatttattagtgagcacacctgtgtatatatataaatcacaaggagatcatcaagggaaaacattttgcatgtgtaaagcttcatgaagttctctttaaaaaataccaaagcttgtttatttctgataattaacctaagcccttatgaaaataaacaaaatgaagggattatgacaggtattaccaaaaacaccaaaaggaacaaaggggcctgcgttaaaacctaattgctaatgcttcacaactaggagagcatgccgtcttgatgtttaaaaaacccagggtctccacccttcctttgatttgtgcaattctgtcttccacagttccggagccttcagtgaggggtagctacatgccccatgcctgccctttctttccttctttgctcactttactatgggtgtattttaatcttgtataaaaatatgcatgaatgagtcatgcacatgtatacgttatgtatttgacaagtggtggtgaaacaaaatcaaaacagatttgatttgtgtttttgaaatgtcagtacattttgtgccactaacactgtgatgtataaaagagctgtttgaatgccttttaatgttgtgttttgtactctggaatcatatggaaaaagtttgatttgtaatttcaatacatattttaaatgtattgtgtcttacgtagtttgtccccccctttagcagggattcctttttaaagctattttggctggaatacaggtgacttttgtaaaaaaaaaaaagtcgacnn

SEQ ID NO: 21860 - DNA, 649 bp, Homo sapiens
  misc_feature 1, 2, 644, 645, 646, 647, 648, 649: n = A,T,C or G
nnactaagtcctaagtacatttccatgtcacaatgtttcatgaacatgttaactccttcatgtaccttaagatattttaaaaataagaaaatgtagtttgtatatgtatgcattcacatatatatatatacatactaatatgtaaggttttaacataaaatagcagttaaagacccaatatagggtaagttttaagagtttttcatgtcagaccactagttatgctaccaaaagaataagcaccattcctccagcacagcaacaataacagcagaagttccccacccccaaaaaagtattatcttcaaaatttgtcctaaaataacaattcttttaactttaagaatggtttcaatagtttggttgcaataattttccacagctatgaagcagaaaaaaaaatataaaagtttattcttgggtttaggacttattaagaaaatttcccctcccatttctatcaaattcacctgatcaacgcagggtgatgctaatactcatttatattccatagtatttccaagaaaatatacatgtatgtattcttggtgtcaggaaccaagtcaggaatgtttaaatatacacatacgaataaataataaagccaactacaaacaaatacattggtgtacccaatagtggannnnnn

SEQ ID NO: 21861 - DNA, 2677 bp, Homo sapiens
  misc_feature 2671, 2672, 2673, 2674, 2675, 2676, 2677: n = A,T,C or G
gggcgccgcccctagccgccgcgctttcccgctcccgcagcagcagcctcccgcgtcgctgtcgctgttgcctccgccacctcctccgccgccgcgcgcccctcggagttccgcgccccaccatgcccaacatcgtgctgttcagcggcagctcgcatcaggacctatcccagcgcgtggccgaccgcctgggcctggagctgggcaaggtggtcacgaagaagttcagcaaccaggagaccagcgtggagattggtgaaagcgtgagaggggaagatgtctacatcatccagagcggctgcggggaaattaacgacaacctgatggaactcctcatcatgatcaatgcctgcaagattgcgtcatcatccagagtaactgccgtgatcccgtgtttcccatacgcccgacaagataaaaaggacaagagtcgtgccccaatttctgcaaaacttgtggccaatatgctgtcggtggctggggcggatcacatcatcaccatggacctgcatgcttctcagatacagggattctttgatattcctgtggataatttgtatgcggagcccgcagtcctgcagtggattcgggaaaacattgccgagtggaagaactgtatcattgtttcacctgacgcagggggagccaaaagggttacatcaattgcagacaggttgaatgtggaatttgctttgatccacaaagagaggaagaaggcgaatgaagtggaccggatggtcctggtgggcgacgtgaaggaccgtgtggccatcctcgtggatgacatggctgacacttgcggcaccatctgccatgctgcggacaagctgctgtcagctggagccaccaaagtgtatgctatccttacccatgggatcttctctggaccagctatttccagaataaataatgccgcctttgaggctgttgtcgtcacaaacacaattccgcaagaggacaaaatgaaacactgcaccaagattcaggtcattgacatttccatgatcttggccgaagcaatccgaaggacacacaatggggaatccgtgtcctacctgttcagccatgtcccgctataaatccagaatgggaagtgtccagcaagcctactctgacttctgacttgtttttgttttctggatttttagctgtaggtattcagcaatgataggttaatcactggcaaaagcatcagatctttgtatatgctaagatttattgtttccccttctaaagctcaagatcatttctttccagtttttggggaaatggtggtggttatttggtctttaagtgaactgtcttaaatgagaaacgtttttgtcattttgacttttaacaggtacaggtgatctcttcctttgttctttcagtactttgaggcgacaactttcaagtatataatttcattgtggaagtcatagtttatatatttcgaggttgccaaaggtgacttcagattaaagccttctgtgtaaatatatactgataatgcctatggacatttgggtaaaaccctgtatagaattaattatccttttactttggagtgaaccttggaaaatttataattataataccatggattttgaattttcctttttttttttttttttggataactcagtttcagataaaccatcttggttactgtgcttaatttggaccaaattttatttagcttaatatggacactgacacattttggggggtatacattagacatatcagagcagtgtatttctggatcattttttaaatgacctcttctaaaacataactgtcacttacctgaaatgctgcatcctaaaattccaaaattatattgagcaatcgccaaggcctaaagccaactgacttaaaggtaatcatttcagctaagattaaatttaaagcctaagaatgtatagagctagttttaaaataatgatctcagatttttaaaaaggatataggaacctgcattgtcattctctgaattaagaactgatggtttctatcattatttagccccacctttgtattttaaaatccttcagaatacatttatgaaccaatgcgactggacttagccacacacaatggaaattcagaccttgactatttggtgtttccagttcacaaaggtgatgaagactgtcttgggagcagcttaatcccaaaatttgtacatttcttgctgctcctggcgtggaaacttaagtgagaccaccaaatacattggtcctgtccaattctactgaatgggggtggacctggcatttatctggccaaaaacaggagccagagaaatatgaatataccaaagttgtttgtttagcctccaacttaaattacattagtcaacttatagatactcatatgatcacttttctttttagatactacatcaactagattcaggagtatatcatttgcagtgcttgtattggtttaaaatgtaagattttaagatcctctaacactgtactaaaacatttcaataaaatcattctgactgcgttcaaaaaaaaaaaaataataaagtaaatgaaaaaaaaaaggggggggggaaaaaaatatcgggggggccagttttggacacctttttttaaaagggggccaaagggggggttaaaaagagggggggggggataaaaagtggtggaaaaaggtgggtttttgaggaccnnnnnnn

SEQ ID NO: 21862 - DNA, 4967 bp, Homo sapiens
gagtcgacccacgcgtccgttttttttttttttttttttggaggtgatggatatatttaatatcttgactgtgccagtgatatcatgggtgtatgcatatttccaaaatcatgaaatcgtatatgttaaacactttgtatgacagatgcatccgacagcattaactcaagcataccctgagaatgactgtatggtctaagaagaatatgtgttcagagtctaagctaaggaatccgggaatggccaacccagagagattcacttcttatctgtgaaggacacttgaactccctgcctgtccgttggaactcaggatgtgcaaggaaccaaggccttttattttgggttaaatggaggttgctaagtggagagtgctaagtagaaatgttatataaactacatactctttacaaatagtagcggtcctgtccagcccactgccactggaccacatctgtatttaagtcctaaataaaccctatgtcccattcactggctctgggtctcttcttggacaaggcgccatccctgttggaatcaatagggctccagcatgacacatgtgcaggattttttaaattatatcaattatatctcaataaagctgttgaaatttttaaagggcctgacctgtcctggaatggggaaaaacttaatgtgacaaaaatgtaggttatagtgaagggaacaggaaatggtactgggaccatttttactccagctaaaaaatttgaatttaagaaatttggatatagataggaaggagctaatgttaagcaggaagtaagttgataagagttttctgttaaatgtgatggcaaagcggtaggtgagtatgggctccagtgggacagaacttgtggcagagaaaccaggtcaaaagttaaagttggatttggtgagtaattaaagagagtagtagcatttccaagacagaaattaatgagctttgcttacatgaaaagattaagaggataagcttaagaacaataagtaccataaaaatgggtggcaatgatgatacattaggggtggaggacctagggtcataaggttgcccgtggcgacttggagtgaagtgttgagatgatatgcccatttcatggggagaagtagaaagaacagaaaaaccacttttactttagttctggtgtaactatgaagaaaaaaaagcctaattgaggacaagaatagacctcgtttctatgggcaacaggcatattctgctccctatttcattatttcgcttaaaaaacacttggtgaagacttgatgcagattgtcctcttggaatctctgatcctgatgtttatttaagtggcagagtggtggcttttccatggtatatagtcagattctttttttttttttttttgaggtggagtctcacgctgttgcccaggctggagtgcagtgttgagatcttggctcaatgcaatctccacctcacaggtagctgggactacaggcacctgccaccacgcctggctaatttttgtatttttagtagagatggggtttcaccatattggtcaggctggtcttgaactcctgaccttgtgaccgcccgcctcggcctcccaaagtgttgggattatagtcgtgagccaccgtgcccgtcctagagtcagattttaaatcttcaaatattcaagaccggtttattagctatttgaggttgtgaacgcttctccttccttacaagtgcaaagcctaactcattgaatgtgtggattacaaaacaagaaaacattaacttattgcaacagagtctggtttaattaataaatctttttggaagttttctttgacagatcctacataaataaatatagttttaaaagtggacttttaaacatcagtttttcctttccgtcatggttttcctacgacaaggataaaagacccctcttccttatttgaaaattctcgcaatcaactagaactgaaattatgaacaccaactctgtcaaaactatacttttgttacttcttggtgagcaagagaaatgaagaaaacaaaagaaaatcatgtgctattttaatgtaatttatcctatacttttttcaaaaagtcacactcacgtctgcttgagagttttagaggaatataatgtatgaaagaaaattccaataacataatgtacaaaaatgttgtcacatacagaagagcaaaaatctacgtattggggactattgctgtgggaagaagggcctgatcttcatactcatcttcctcattgagtaccatgaccccttccaattcatccatactacaccatcatctgtgccatgctttgccatgtcccaggtgtactgtccaccccagtagtatctgccgtttggattggctgcatgacatctattataccaccatccaccaccgtcttctttagaacactgttttctgggatctgatgttaaccagccgtcattgtctctgtcatacgtgctgaagaacatgccgttgtgaatggtcatggtcctgttttctcccatcagctgagatgctccatccatgagggcattaccggctgttcctctatatttgttcactgagatctggtatttgttggcttcattctgtacagtgaatcctccatagtgagcctttactttgtctcctttccagtcctccatttctatcaaaagttctgtgggtcccatcctggtaagctggctaattttatcatttccaagccaatattcacctggtaggccacagtaattcttcccatctgtgttggttgcaacatttccaaatccctgtttatatggatcccatttcctgccaaagtcaacactaccgtcttgacggttctgaatcactgtccatcctccattttctgtattcatgtcacagtatactctatacggtttgacagaactgtcaggttgaatgagatacatttcagatgtttcacctcctttcctgataatttcctcacattctttgccagacaccacaggaatattgcaactgacagtgcatggggtgcgacaatattccatttgagctgagacatcagattctaacttttgtattttgcttctcaggttttccaggattgaacgaagcacacgaaggttagttgggatattgctattcacagtctcatctatatataattggtgcttttccagttctgaggagtactcattgactacattttcattatcttttacttgcttctgcctcttttgccacaggtctttcagcaaatacatgtactgaaaggaagaagaggaggtctgggaaacagcttccacattgttatttaactcatcaacactatttctgattggcctttcctgttgtagcaaagcctcttgcaactgacatcctgtaggacacaacacccccaggtctgggtcagcgtgaagacagcctccagcatcaggggcttttctttctactttcttttgagtggcagctgctttggctggacgagcccgatagccacctccactgatgggcggtggggcaggcctcaggctgggagcctcttctctcttcttgtcaaggggtcgatgaccacgggcactgaagaaaccctcctcattgtcgttgacaccttgggacttaactagaaaaacacacaatagtagcaataatagatgtttcatggttttaagtttgtggaagctccaagaaacctcgtgccgaattcggcacgaggaactagtctcgagttttttttttttttttttttaaaagaataaaatttattgtactctcctcgccccagggtgcccctgggaaagcctgaggctacttgtacgcgttggccttgtgcttcggcaagaaggcgaagctggggggcactggcccaaggagcatctcgctgatgcggatccagtcggctgccttctggctggccatcagcgtctccaggtagtcgcggcccaggtagtagggcggccgctcgttgatcctctgtgggagccgctccagcagccccacgggcacgtaccggcacaggaaggacagccactcgagcagaaagcgccgggtcttctccacgccctgcgtgtccgagccccagtgctccaggccgtagttggtgaagtcccgcaggatgtccaggcgctcggacgacgagatgtcccagtgccgctgctccttgatctccgtgaagagccacgggcttgagcagggcgccacgggcaatcatgatcccggtgacaccagtctgcatgggcgcggttggcatcctcaaatgacaagatgtccccatttccgtgacgagtgccacgccccagtcccgcagctcgggcagcaggcggtgcgccaggttcacacgctcctggacgcctgtgcggatcttcacagtcagcggcacatccagcacctggttcatgccacggacgatctgctggaacttggtggagcgattcatgagggcacagcccccacccttcttgtacacgaggtcgatggggcagccgacgttgatgtccacaaagtccacctccacggtgcggctcagcagctcggcacacttggtcatggtgtcggggaaggcgccctccagctggacgccaaagatgtcctcacactggtggcgtttgagtagggcccactcggacatctggccctgcagcaggttggtgcagacggccatctctccacatgtcacatccgccccgaagcgcttgcagatccgtcgtaagggcaggttcccacacgtggtgaggggggccaggtaaagtttgccacggatgtccagccgcttcttctcacagggccgcagcctgaccacgtcctcatccgtcaggggcccgcaggtccgcacggggctgctgggaggggtgctagtgcccggccctgcggggacctgctgggcaccacagttttcctgcctgggagcgccctcggctgccgtgccctcggggacagcggcagcgggtgtggggccctggctgaaccggcgcagggcccgctcagctcgctcgaagcggacctc

SEQ ID NO: 21863 - DNA, 2503 bp, Homo sapiens
  misc_feature 1, 2, 3, 2475, 2476, 2477, 2478, 2479, 2480, 2481, 2482,2483, 2484, 2485, 2486, 2487, 2488, 2489, 2490, 2491, 2492,2493, 2494, 2495, 2496, 2497, 2498, 2499, 2500, 2501, 2502,2503: n = A,T,C or G
nnnggcaatgctgccctgacgcagcattgccaattctaaatccatcatatgactgaggaggagaggtttgaagttgatcagctccagggtttgagaaattcagtccgaatggaacttcaggacctggaactgcagctggaggagcgcctgctgggcctggaggagcagcttcgtgctgtgcgcatgccttcacccttccgctcctccgcactcatgggaatgtgtggcagtagaagcgctgataacttgtcatgcccttctccattgaatgtaatggaaccagtcactgaactgatgcaggagcagtcatacctgaagtctgaattgggcctgggacttggagaaatgggatttgaaattcctcctggagaaagctcagaatctgttttttcccaagcaacatcagaatcatcttctgtatgttctggtccctctcatgctaacagaagaactggagtaccttctactgcctcagtgggcaaatccaaaaccccattagtggcaaggaagaaagtgttccgagcatcggtggctctaacgccaacagctccttctagaacaggctctgtgcagacacctccagatttggaaagttctgaggaagttgatgcagctgaaggagccccagaagttgtaggacctaaatctgaagtggaagaagggcatggaaaactcccatcaatgccagctgctgaggaaatgcataaaaatgtggagcaagatgagttgcagcaagtcatacgggagattaaagagtctattgttggggaaatcagacgggaaattgtaagtggacttttggcagcagtatcttcaagtaaagcgtctaattctaagcaagattatcattaaacagaaattataggttggcatggatcctattagctgtgtaatactggaattatcaatgatatgcactggtggaggtgttatttgtgctttagaagatacttgctgttgagctgggctactgtatacagtgtacaatgtgtatttcttcaaccatatattttaaaaagacgtacatagaaacttaggcactttgctatttcttttctaaactatcaaaaactctagcagtttgaaaagcctaatatttatttgtatgtcaatatttttcatttgattccctattagaattaattttaaaacttgaagacttccagacttatccaacttataaataacatatttcttcagactaacatcttaaaacactgacctctatgaggtatttactgtgcaataactgattcatttttttcagagcttgaagcatccaatgatttttccctccactgctgttaattaatgtcacttccaagaagaaaaactgttctgttgtaaaaaatataattgctcttaattcttggggaggttactaatagcagtaggatagaattttatgaggttacctacaactacttaatgtacttacactgtaagccttgttgctttacccaagacaaatgtaattttatcattgcttatgtagtatttttcttttggaaatgtgccttatgttaaacactatgtacttttactttttgcattgtccagacttctttattagatggagatgtttctttttctgtcttctagactaaatagagtatcatccaaataatggggcctatgacttgaatgaatagaaatgaataagctggtgtttgttttttcaaaatggaagtaatttagatttgttctcctcatacataaaatgattttagttcagttttaaccagtgaaaactttgtttttatgaaaaaaaaggaaaatggtttcccatttggttttatatgtgttaaataaatgtgtaaagtaaccaccaaatgttattagaatttttcttctagcatttataattttttcaactcctattgtgtttctttgtgtgtgatattttaatcaaaagtggttgagttgttaacagtgttctttgaaagaatctctaaaaggcttataaatgtttgaaatatcacacaaaggctgatttctaaaatatatatatattaaaacaataaagtatttattttgcctaaaaaaaaaaaaaaaaaaaaaaaaaaagcaaaagggcggaaaaaaaaaaaaaaaaagaaaaaagaaagaaaacaagaagaagaaaaacaacataagaagaaaaggccacaaaaaaagaggacgaagaaagaatagaggacaaagagaaagacatgaatttgtaccacaaaaatagtgcgtctccccattggaaacactaaaggcctacgcaccggcgagccaagaagccaacgtaagacaaaaaagggagagaaacgcaggcgcgaaggaaagacagacagaagcccggcatcagtgcgaaagaaacaaacacaaagtagtgacatagtcgtgcggccgaggtaaaaacacagacaggaggggaaaaaaaaaaaactggaaaatcagccagctataaaggggagacacaggtggcagaccccaacacaggagagnnnnnnnnnnnnnnnnnnnnnnnnnnnnn

SEQ ID NO: 21864 - DNA, 900 bp, Homo sapiens
atagcatttttgttgccaaattataagtaaattgtaggtatttattaatatcattccaaggaatgactagcagtgcaaaaaataggtactttagtggtaacaattatttgctaataatccagaacctacaaataacagaaggaaacagcacactcttaaataaataatgggacaaggaagaaactacaaagtcaattagaaaatactttaagattatgtagaatgagggcccaacaaacgaaaatgtattgaatgcagtgaaatggtgcataaagggaaatttattatttaaatgtttgtatctaaaaaagaagtaagggctcatataaataaacccaatcttccacatacaattctggaaaaagaagagcaactaaacctaaagtgagcagaaggaaagaactaataaaatgttaagtgaaaaataaaggagagaatacaaaaacaataggtagaataaacaaatctaaaagttggtacatgttccaaggcaggtggctgtgaacttcctctgagtgaaggcatcccctccagcacctttcagcctgctagttaggacgacccgccgccaccctccaggacctccagccctgcactgcctttcctctcttttaaataattcttcattgagttctaatatgtaaaaaaaaaaagtttactgtaaagtttgcaaataaggaaattttttttaaaagtcctcagtaatcttaccagtaacaattgttatgggcacatttgcttttggaagatttcttttgtatgcatgggataagtacctgcccgggcggccgctcgacacaaaaatgattgcgaatgatgtccatacactcaggagatctaaagccactgttggacgcccttgatgcttggcgatatgtactcggccgccaccgcggtgga

SEQ ID NO: 21865 - DNA, 423 bp, Homo sapiens
  misc_feature 390, 391, 397, 411, 412, 413, 414, 415, 416, 417, 418, 419,420, 421, 422, 423: n = A,T,C or G
ttcctcttgtggataacgcgtggcctttcaggctgagaactatgaaacaggcaggctactagttaggattaataaaaaaataccttgatctgctgtcttcgtagcatggcaagttctctcatgtctcggaatggctgtagtaaatactgatagagttcggttgtagcttctgcaaggctgctgtaggcttcatcctccatctgatacaagtccagaccagctccaccatgccctctgtattcttgtgcttatccaagagctcctggatgcgcttcctggcccgctgaagcacttcttcgtagcccttctgccgcagctcgctgaggctttcgtaatactcctcgggatcatcggtctcggtgaagagcacctgggagaggatcttccagnnccgcanggtgtccaggccgnnnnnnnnnnnnn

SEQ ID NO: 21866 - DNA, 2308 bp, Homo sapiens
  misc_feature 2195, 2204, 2247, 2255: n = A,T,C or G
cgtccggccggctcgagcccgctgggcactcggaggcgcgcacgtcgttccccgccctccgcgccgccgcccgccctcgctctctcgcgctaccctcccgccgcccgcggtcctccggtcggttctctcgttagtccacggtctggtcttcagctacccgccttcgtctccgagtttgcgactcgcggaccggcgtccccggcgcgaagaggctggactcggattcgttgcctgagcaatggctgccatccggaagaaactggtgattgttggtgatggagcctgtggaaagacatgcttgctcatagtcttcagcaaggaccagttcccagaggtgtatgtgcccacagtgtttgagaactatgtggcagatatcgaggtggatggaaagcaggtagagttggctttgtgggacacagctgggcaggaagattatgatcgcctgaggcccctctcctacccagataccgatgttatactgatgtgtttttccatcgacagccctgatagtttagaaaacatcccagaaaagtggaccccagaagtcaagcatttctgtcccaacgtgcccatcatcctggttgggaataagaaggatcttcggaatgatgagcacacaaggcgggagctagccaagatgaagcaggagccggtgaaacctgaagaaggcagagatatggcaaacaggattggcgcttttgggtacatggagtgttcagcaaagaccaaagatggagtgagagaggtttttgaaatggctacgagagctgctctgcaagctagacgtgggaagaaaaaatctgggtgccttgtcttgtgaaaccttgctgcaagcacagcccttatgcggttaattttgaagtgctgtttattaatcttagtgtatgattactggcctttttcatttatctataatttacctaagattacaaatcagaagtcatcttgctaccagtatttagaagccaactatgattattaacgatgtccaacccgtctggcccaccagggtccttttgacactgctctaacagccctcctctgcactcccacctgacacaccaggcgctaattcaaggaatttcttaacttcttgcttctttctagaaagagaaacagttggtaacttttgtgaattaggctgtaactactttataactaacatgtcctgcctattatctgtcagctgcaaggtactctggtgagtcaccacttcagggctttactccgtaacagattttgttggcatagctctggggtgggcagtttttttgaaaatgggctcaaccagaaaagcccaagttcatgcagctgtggcagagttacagttctgtggtttcatgttagttaccttatagttactgtgtaattagtgccacttaatgtatgttaccaaaaataaatatatctaccccagactagatatagtattttttgtataattggatttcctaatactgtcatcctcaaagaaagtgtattggttttttaaaaaagaaagtgtatttggaaataaagtcagatggaaaattcattttttaaattcccgttttgtcactttttctgataaaagatggccatattaccccttttcggccccatgtatctcagtaccccatggagctgggctaagtaaataggaattggtttcacgcctgaggcaattagacactttggaagatggcataacctgtctcacctggacttaagcgtctggctctaattcacagtgctcttttctcctcactgtatccaggttccctcccagaggagccaccagttctcatgggtggcactcagtctctcttctctccagctgactaaactttttttctgtaccagttaatttttccaactactaatagaataaaggcagttttctaaacttcctgtaaaaaaaaaaaattcactggccgtcgttttacaacgtcgtgactgggaaaaccctggcgttacccaacttaatcgccttgcagcacatccccctttcgccagctggcgtaatagcgaagaggcccgcaccgatcgcccttcccaacagttgcgcagcctgaatggcgaatggcaaattgtaagcgttaatattttgttaaaattcgcgttaaatttttgttaaatcagctcattttttaaccaataggccgaaatcggcaaaatccctttataatcaaaagaatagacccgagatagggttngagtggtgntcccagtttggaacaagagtccactatttaaagacgtggactncaacgtcngggcgaccgtctatcagggcgatggcccactacgtgaaccatcaccctaatcg

SEQ ID NO: 21867 - DNA, 5206 bp, Homo sapiens
acgcgggctttcagtcgggcgctgagtggtttttcggatcatgtctggtggctccgcggattataacagagaacatggcggcccagagggaatggaccccgatggtgtcatcgaggtaagaaacggttgtggatcttgaagctttggaaaggtgagtgtgttcatctcatttatgcgtgcattattttttctaacttacagagcaactggaatgagattgttgataactttgatgatatgaatttaaaggagtctctccttcgtggcatctatgcttacggttttgagaagccttccgctattcagcagagagctattattccctgtattaaaggtaaaagaaactggcatttttaggaaattgttctacatagacatgaaccataaaagggaaagtaacctctgggggactagcacctgtttgtattccttaaagtgaaatgatggcaatcatctttcgggactgacctgaaatgaagagaatactcattgctgatcacttgattatttgggcataatgttccaaatggaatacatggtgtgaagtagaagtgacaatttgatgtgggatcggtaaatgtgtatcctactttttttagggtatgatgtgattgctcaagctcagtcaggtactggcaagacagccacatttgctatttccatcctgcaacagttggagattgagttcaaggagacccaagcactagtattggcccccaccagagaactggctcaacaggtattgatagtgtagttcaaaaaaactgcttgcgtgttgcataggtttcaggtttcacaactgtgaagaatttaaaacttagtataaattggtcctaccagatccctccttttaattgtccatgcatgcagggagtttttgttgaaagttttaaaagaactgggtatgcaggtatggtttgtagggttgtatactaatagattgagaatccgaagcgctctcttggatgtactagatctgtccccattttttaagtttgaatgcagttgtgcaacatgaaaactgcagtgacatgttaccatttgactgtctccgtagttcgtgatgcatctgttgcatgctatgttttcaaagctcactgctatattggctttgaagtaaaccttcctaataaagctgtaggctttattgaggtcaggattatataaggcacaataccctctgggggaaaaaaatcatttgccctagctgtaattacagaacataaatttcactacgtactccctacctacagtgaagaataatgtaggaaacgttattcttggattgtctagctgatgcgtggagcagcagcatcccaagtttgacaaggcataagaaagacattaagggaattttaccttgcagcagttaggtcgtctgcattttaagcttggaagtagttttgtgctgtgcatgcataaaagctgttggcagaccagattatatttgcctttatgctttaaaaattagtcattgatcctggagttctgcggaataataattaaggcttgggttttagatccaaaaggtaattctggcacttggagactatatgggagccacttgtcatgcctgcattggtggaacaaatgttcgaaatgaaatgcaaaaactgcaggctgaagcaccacatattgttgttggtacacccgggagagtgtttgatatgttaaacagaagatacctttgtaagtattgtctttaagagagtattttttttaaaactgttaacatagttgaaaagtcaaattgtatcactgagtagatctagaaatgacagtatgactttgtttctaacagctccaaaatggatcaaaatgtttgttttggatgaagcagatgaaatgttgagccgtggttttaaggatcaaatctatgagattttccaaaaactaaacacaagtattcaggtaagcattacttcacccccctcttaaaggtagagatggggtttatttaatgcaggtactgttacaatacaactgatgtgttttgttgtcgttccccctgcttaaagcacttgatgcataactctgtctaccttcattccgtagtaagacagagacgcttggcttcagacattttcctttgggtattaatgtgtaagttgtgctacaacataattttctctttttaaggttgtgttgctttctgccacaatgccaactgatgtgttggaagtgaccaaattcatgagagatccaattcgaattctggtgaggaagaattgaccctttgaggaatcaaacagttttatattaaaagactggagagaggaatggaagttggatacactttgtgacttgtacgagacactgaccattacacaggctgttatttttctcaatacgaggcgcaaggtggactggctgactgagaagatgcatgccagagacttcacagtttctgctctggtaagaggtgttctaaaatgtctggatttccactaaagcaggattcagactacaatatagctgctaagtgctgtgttgtcgttccccctgcttaaaataaagttgtttcttaactatacctgtctgctattctcctgtagcagccagggacgcttggtctcatacatgttgattaaaattaaataccgacctgactggtgattcttgaattaaggtttattaatttgcagcatggtgacatggaccagaaggagagagatgttatcatgagggaattccggtcagggtcaagtcgtgttctgatcactactgacttgttggtaagtctcttaatgctttttaaaaatctaccaaaagttagctttttggggggcaggtttttaagtaacctttgccaacttgggctatttggaagagtaaaagaccacactccacagtgggctataccacttagtatagttcgctactattttgtggcctacatgacaggtgtcaagtttttttgaatcaatttttaaaacatgccattgtgtttcaggctcgcgggattgatgtgcaacaagtgtctttggttataaattatgatctacctaccaatcgtgaaaactatattcacaggtgagaagccagcatcttggctgtattgaaaaaaattcatacgtttttctactgtgatttgtatgaaaggtaacatcaaatcaaggaatagattcagtaaagtcagtagtgttcagtaagatgatgtaattaaatttgtactagggaaggttgatgagaacaaagtgggaaaacttgtaaacattgcccagattgtggacatagggtttttttccacaattgttggtcgtaccttatgcttgagcttttagtgatgttcttgtgtccatgtgtttttcttggtgattttttctatagttgggattttcttggtgtcgcctggtagcaatttgagtgaaccctggtttagttatagtggctttatccctaaataaattgaattgtactttgttatatgatgtaaaaaaagactttttaaaaaatacaggagtcgatagcagcagttggtgacgagatggcactcagaaacggcgttgacgtaatttaggacgtggaatcataagcgaaacagcacactgtttgaataaagagcgagtcggtatttatatttgtttttcttttgtcatgattatttgatttttaagttgctccagctaaggcatttttttgtattagtatttctattagggaacctttcttattaggtggtttgtattgtctggtttctaacatgcaggtagctgtttggcagttaaacacgtttagagtaatttgagttacaacgtgtgaaactgagcaaaaaagcagtgataagtttgggttaccataccaaatatttgttttcccactggaaaaaagtaagttttagaaaatagttaacctttgcagcatttgtttacagtttacagttccagaagtgcgtcgaaatggattacataactgctcttttattcctggtgttcacatctgtcccaggctgacacctgctcttggctggcccactttggtatgggctttaatttcactaccccaaacacgatactgtcatctgctttataataatgctcaagatgcctgataaaaatctcattttgcagccagacaagccttgaatccttttggcactaactgcaaaggaagatttttttctctagatatgcattagcagctagtgctccagttagaagcacgaactataaccttgataagtaaacagcagctggtggttaacaagtggatcgtcatgttcagtagtttatacattatgtgagaagtaacgttctgattctttttcttacacagaattggcagagggggtcgatttgggaggaaaggtgtggctataaactttgttactgaagaagacaagaggattcttcgtgacattgagactttctacaatactacagtggaggagatgcccatgaatgtggctgaccttatttaattcctgggatgagagttttggatgcagtgctcgctgttgctgaataggcgatcacaacgtgcattgtgcttctttctttgggaatatttgaatcttgtctcaatgctcataacggatcagaaatacagattttgatagcaaagcgacgttagtcgtgagctcttgtgaggaaagtcattggctttatcctctttagagttagactgttggggtgggtataaaagatggggtctgtaaaatctttctttcttagaaatttatttcctagttctgtagaaatggttgtattagatgttctctatcatttaataatatacttgtggactaaaagatataaggggggtaaaatctgggcaattggttaactaaggtatttggataaacggggcgggccgagaccgagatgaaaggcggtaaaaactctttgaaacagccttgaaagccccggcgggaccgacgcattccccaagacgtacacagcgcacagcggaaaggacccgcgtgttccccaccaaaccacagggggcccctcacaacgcatcaccctctccatcggcgacgactctcctccaccacaaaagcaccaaaccggtaccaacaaaaaaggccggggagcgcgcatgtgcttgccgcgtagtactccccaaacagacgcacacgatcacgacaaacacaaaacaccacaaccaagcagcacacaaaaccagagaaccccacaaccacacaccaacagcaacaccacaaccacacgggacctccatcgctcgcctgtgccgcgcaaccaca

SEQ ID NO: 21868 - DNA, 358 bp, Homo sapiens
  misc_feature 358: n = A,T,C or G
acgcgggggcgtgctcccaacgtcgccccggtttgacgcacacggcaccaaactgtttgatttaattttggatgagatcgttcttgcagcaagatgttaataagacaaaatctagaccttaatgggttaaatgggcttgccaacaatatggatgatttgaagataaacaccgatattactggtgctaaagaagaactcctagatgacaacaattttatctcagacaaagagggcgggagttcataagcccaaagattgtcaaacatcatttcagaaaaataatacgttgactctgcctgaagaactgtcaaaggacaaatctgaaaacgccttaagtggaggccagtctagtctattn

SEQ ID NO: 21869 - DNA, 1295 bp, Homo sapiens
  misc_feature 1, 2, 1285, 1286, 1287, 1288, 1289, 1290, 1291, 1292, 1293,1294, 1295: n = A,T,C or G
nncggcacaacatgctattgcctagattagtactcagagtgaacgcaaactgcctcgcttcgtctttacaagagaggtaagaaaggatgaaaatagtaaacagaaaactcagctcaggcacaattgtcaccaaggagttaaaagcttcttcttcaatagaggaattgttctgggggtcctggagacttaccattgagccaggcaatctgggaagcacaggaataagtagacactttgaaaatggatttgaatgttctcatcccttttgcagcttttctttttggctctctcatgtccttggcttgctcctctattctacctctctttctccagcaataatatgcaaatgaagacatgtatccataagaaggagtgctcttcatcaactaatagagcacctaccacagtgtcatacctggtagaggtgagcaattcatattcaaaggttgcaaagtgtttgtaatatattcatgaggctggaagtaagaagaattaaaaatttgtcctaattacaatgagaaccattctaggtagtgatcttggagcacacatgaataactttctgaaggtgcaaccaaatccatttttatttctgcctggcttggtcacctctgtaaaggtttaacttagtgttgtcaagtaacagttactgaaagagctgagaaaaagaacaatgaacagcaacgatcttgactgtgcaactcagacattcctgcagaaaagacatatgttgctttacaagaaggccaaagaactatggggccttcccagcatttgactgttcattgcatagaatgaattaaatatccagttacttgaatgggtataacgcatgaatatttgtgtgtctgtgtgtgtgtctgagttgtgtgattttattaggggcatctgccaattctctcactgtggttccttctctgactttgcctgttcatcatctaaggaggctagatccttcgctgacttcaccattcctcaaacctgtaagtttctcacttcttccaaattggctttggctctttcttcaacctttccattcaagagcaatctttgctaaggagtaagtgaatgtgaagaggtccactacaacactcctacaggatatagggtgggtggctggtgaaacagcagtctggcctggggcgcgaagggggaataagccacaacctcagggcgaacgaggggaccaggggggggaggagaaccgcacggccaccgggggcgagtccccacgtggagaagaagtacccctggagagacaaagggggcgaaaaccgccaggtgnnnnnnnnnnn

SEQ ID NO: 21870 - DNA, 4933 bp, Homo sapiens
  misc_feature 1, 4929, 4930, 4931, 4932, 4933: n = A,T,C or G
nccaaacccggcaatgttggtggctcttgcattcctctggatgagcgaatctagttggggggttcccgaaggggaaggcgcctgggctttcaatacatcctcctgaatcatactgcgtttcaggttccttagaaaaatttggatgtgtaaaaagaactcttaacggcgatgcaggtcttccacagctaaggaaccaacataaagagaaatgcagacgatataaccagtaatgaccatggtgaagataaagatattcatgaacagaacagtaagaagcctgttatggtctatatccatgggggatcttacatggagggaaccggtaacatgattgatggcagcattttggccagctatgggaacgtcatcgttatcaccattaactaccgtctgggaatactagggtttttaagtaccggtgaccaggcagcaaaaggcaactatgggctcctggatcagattcaagcactgaggtggattgaggagaatgtgggagcctttggcggggaccccaagagagtgaccatctttggctcgggggctggggcctcctgtgtcagcctgttgaccctgtcccactactcagaaggtctcttccagaaggccatcattcagagcggcaccgccctgtccagctgggcagtgaactaccagccggccaagtacactcggatattggcagacaaggtcggctgcaacatgctggacaccacggacatggtagaatgtctgaagaacaagaactacaaggagctcatccagcagaccatcaccccggccacctaccacatagccttcgggccggtgatcgacggcgacgtcatcccagacgacccccagatcctgatggagcaaggcgagttcctcaactacgacatcatgctgggcgtcaaccaaggggaaggcctgaagttcgtggacggcatcgtggataacgaggacggtgtgacgcccaacgactttgacttctccgtgtccaacttcgtggacaacctttacggctaccctgaagggaaagacactttgcgggagactatcaagttcatgtacacagactgggccgataaggaaaacccggagacgcggcggaaaaccctggtggctctctttactgaccatcagtgggtggcccccgccgtggccaccgccgacctgcacgcgcagtacggctcccccacctacttctatgccttctatcatcactgccaaagcgaaatgaagcccagctgggcagattcggcccatggcgatgaagtcccctatgtcttcggcatccccatgatcggtcccacagagctcttcagttgtaattttccaagaacgacgtcatgctcagtgccgtggtgatgacctactggacgaacttcgccaaaactggtgatccaaaccaaccagttcctcaggataccaagttcattcatacaaaacccaatcgctttgaagaagtggcctggtccaagtataatcccaaagaccagctctatctgcatattggcttgaaacccagagtgagagatcactaccgggcaacgaaagtggctttctggttggaattggttcctcatttgcacaacttgaacgagatattccagtatgtttcaacaaccacaaaggttcctccaccagacatgacatcatttccctatggcacccggcgatctcccgccaagatatggccaaccaccaaacgcccagcaatcactcctgccaacaatcccaaacactctaaggaccctcacaaaacagggcccgaggacacaactgtcctcattgaaaccaaacgagattattccaccgaattaagtgtcaccattgccgtcggggcgtcgctcctcttcctcaacatcttagcctttgcggcgctgtactacaaaaaggacaagaggcgccatgagactcacaggcaccccagtccccagagaaacaccacaaatgatatcactcacatccagaacgaagagatcatgtctctgcagatgaagcagctggaacacgatcacgagtgtgagtcgctgcaggcacacgacacgctgaggctcacctgccctccagactacaccctcacgctgcgccggtcgccggatgacatcccatttatgacgccaaacaccatcaccatgattccaaacacattgatggggatgcagcctttacacacttttaaaaccttcagtggaggacaaaacagtacaaatttaccccacggacattccaccactagagtatagcttttccctatttcccctcctatccctctgcccctactgctcagcaatgtaaaagagacaaataaggagaaagaaaatctccaaaccaggaatgtttttgtgccactgactttagataaaaatgcaaaagggcagtcatcctgtcccagcagacccttctcattggcattttccagtattacaagatcaacttctgaccctgtgaaatgtgagaagtacacatttctgttaaaataactgctttaagatctctaccactccaatcgatgtttagtgtgataggacatcaccatttcaaggccccgggtgtttccaacgtcatggaagcagctgacacttctgaaactcagccaaggacacttgatattttttaattacaatggaagtttaaacatttctttctgtgccacacaatggatggctctccttaagtgaagaaagagtcaatgagattttgcccagcacatggagctgtaatccagagagaaggaaacgtagaaatttattattaaaagaatggactgtgcagcgaaatctgtagggttctgtgcaaagaggtgttttgccagcctgaactatatttaagaaactttgtaaaaaataaaaatgtatatagctgtgagctcaaacaaaaactgcagacaaacaaaaaagagaaaagcttttatttgtgttttcagtttgaaagaacttttagcaaggttgtgctttcaaacacatattagtcctaccaccttagttcctctacagcaaaagaggcttttcttcttaattacatgtaaacaaagacatgggattttctgacgtaagattttcatttgtaggaggatgtgatgtcccacatggaagacccagacggtctgtgtggcctatttccccctgtcaggttgcacaggtgcatgcaagagcattcttaggagaccattgttttagaaaactttgatttgtacatgttagttttcatgaaattgcaacacagagataggtcctaaaagtggaatgtatttaaaacttgttgaattagacacacacacacagacacacacaaagaatcagcagagaaaacaaaatacaagtcctgttctgtagttcttgccctttgaatatatttgggaagagttgcttcctatttcaggaccctgccaaaaaagaagaaagcttgcctttggtggggctatgccccttggagtaaatacagctctgtgttccctagcagctgccggaggatttggctgatgaagtacctgctcagcttagctaatcagattaaaggaagacatgtatgtcttttgtttaagcacctagtcccttatgtatcagtaaacaggtttttaaaaatcttttatgtcatttataggataaaacatatgcttgtctgaaaatatcaccttttgtggatttatctgatcaccaaataataaatattaagaagaatgggggaaaaaggatagaatattaaaactgctttgcataggtttttggggaaattaggatatcttcactgacaagacactgaatggaatttattcacccattttaaattggttacttggggatcagagatttgtctctccaacagcttgtggttttcttattactcattttcaggaaagtttgtagtattacaaggcagaaggaaacacagtagcaatggttgctctatattttgtctttcaaagattactgcattaccaagaaacagtagccaaagatgtttgaagatcatgtcccttagctgcattgtgggttattctagaaatccaatgttaaatgcctctactaaagtggggattccccataaaaattgtccagctacctgactcttttgcaataacaactttgattactgaatccatacactcaaactatagtgatatatcagtgtttgggagtgacctctagaaaaaagaaaactgtttttagaaatacataaaatcacttccaaatcctgttgcttatgttgggttaaatttgaaagcaattctctatatataaatatgtgaaatattatgatctgaacttagcacacatgaagcaacatttctttgctacacagaggtgtcttggaaagatttcattcccaattcatttttcatagatctataatcaggcaatttctgcaagcaatgtatgaccccacctgagcaaccacaaataggctctccatgaaactgcaaaggaactgatgtgtggcatccatgctggttttgtctgtctataatatgaattcaagtatctgttcatatttccaattgtctcctgctagcaatatgtgccacaacatgacagtcttgtgacatcttaaggaaaagaagagttcctgttaaatgaatagctttagcttttacaggggattatgattaaaagtgatttagtacatcttacatgatatctcatttctacgtgaaaagaagttatagaatcttcatagagttccatgagaaaaatatacttgctatttatagaaaacgagaaaaaagaaaaaaatgagaaacaagtaagaaaaaatcctttcctaggcttttccttgatcttcagaggcacacagggtttaatggttccttaggttattattttgaggttttgttctttcttttgccttaagtaatgacagaagatatatatggccagacacatatgtataaacttttcagcagcattttaataataaaatatcacactattttctaatgctttgtannnnn

SEQ ID NO: 21871 - DNA, 615 bp, Homo sapiens
  misc_feature 611, 612, 613, 614, 615: n = A,T,C or G
acgcggggtgcaatccaccagtcttataaatacagtgacgctccagcctctggaagcctctgtcagctcagcctccaaaggagccagcctctccccagttcctgaaatcctgagtgttgcctgccagtcgccatgagaacttcctaccttctgctgtttactctctgcttacttttgtctgagatggcctcaggtggtaactttctcacaggccttggccacagatctgatcattacaattgcgtcagcagtggagggcaatgtctctattctgcctgcccgatctttaccaaaattcaaggcacctgttacagagggaaggccaagtgctgcaagtgagctgggagtgaccagaagaaatgacgcagaagtgaaatgaactttttataagcattcttttaataaaggaaaattgcttttgaagtataaaaaaaaaaaaaaggggttttctcggggggaacccctttaaattttttaaaaaaaaaacccccccacccccccccaaaaccggaaaaataaattggatgccattgggggtggaaaattgttttttgcccctttttaggggtccaaaaaaagcaattcccttccaaatttccaaaaaaaaacannnnn

SEQ ID NO: 21872 - DNA, 360 bp, Homo sapiens
  misc_feature 356, 357, 358, 359, 360: n = A,T,C or G
acgacgagtcctgacaggcctggacctcctaccagaccgcttgtcaaaggcccagttacatctcatggctttagtgtcaaatggggtatgttttgctggtggtggtactgtttttttttttttttttcttttgatagatttttaaaaaatgattcattttagtagtgacaagccaaaaaaattgtggatggtatttgcagaagttttctgcattcggaatatatgtgtgagaaacatcctgagaattctacaaattggaatggacaatttcattaaaatgtaatcgtaatggacaattaaattttagtggaaattaaaatggatgatttttaagagtatctcatttactctatgannnnn

SEQ ID NO: 21873 - DNA, 1181 bp, Homo sapiens
  misc_feature 100, 101, 102, 103, 104, 105, 106, 107, 108, 109, 110, 111,112, 113, 114, 115, 116, 117, 118, 119, 120, 121, 122, 123,124, 125, 1164, 1165, 1166, 1167, 1168, 1169, 1170, 1171,1172, 1173, 1174, 1175, 1176, 1177, 1178, 1179, 1180: n = A,T,C or G
  misc_feature 1181: n = A,T,C or G
acaaagtagcactgatatctcaggtgagtgttccgaaaataatgtctaaggaaccacaggctacttgtttttgacttatgagtcaaggcttcattcagannnnnnnnnnnnnnnnnnnnnnnnnnaaatgtaaaatatttttatagtttgttcatactatatgaggttctattttaaatgactttctggatttttaaaaaatttctttaaatacaatcatttttgtaatatttattttatgcttatgatctagataattacagaatatcattttatctgactctgtcttcataagagagctgtggccgaattttgaacatctgttatagggagtgatcaaattagaaggcaatgtggaaaaacaattctgggaaagatttctttatatgaagtccctgccactagccagccatcctaattgatgaaagttatctgttcacaggcctgcagtgatggtgaggaatgttctgaaatttgcgaaggcatttgagtagtgaaatgtaagcacaaaacctcctgaacccagagtgtgtatacacaggaataaactttatgacatttatgtatttttaaaaaacttgtatcgttataaaaaggctagtcattctttcaggagaacatctaggatcatagatgaaaaatcaagccccgatttagaactgtcttctccaggatggtctctaaggaaatttacattggttctttcctactcagaactactcagaaaaaactatatatttcaggttatttgagcacagtgaaagcagagtactatggttgtccaacacaggcctctcagatacaaggggaacacaaattacatatgggctagatttgcccagttcaaaatagtatttgttatcaacttactttgttacttgtatcctgaatttaaaaccctaccactttaacgaagaccggatgggttatcttttgggagtaggctatatatagtgatttgaattatgtcgataggagcaggatcagggacttgaattcgttttttgtacgattggatttactatggtggtcaattggaaagaggtccattttcattcgggtcaagggttagaggggcagttggggtaaaatggaaaaaaaagaagtgggcgcgagaaaaaggggccgaaagaataagaagataagcggaattgtattaatagnnnnnnnnnnnnnnnnnn

SEQ ID NO: 21874 - DNA, 827 bp, Homo sapiens
tatagggagtcgacccacgcgtccgcgcctcggtatcgcagcgggtcctctctatctagctccagcctctcgcctgcgccccactccccgcgtcccgcgtcctagccgaccatggccgggcccctgcgcgccccgctgctcctgctggccatcctggccgtggccctggccgtgagccccgcggccggctccagtcccggcaagccgccgcgcctggtgggaggccccatggacgccagcgtggaggaggagggtgtgcggcgtgcactggactttgccgtcggcgagtacaacaaagccagcaacgacatgtaccacagccgcgcgctgcaggtggtgcgcgcccgcaagcagatcgtagctggggtgaactacttcttggacgtggagctgggccgaaccacgtgtaccaagacccagcccaacttggacaactgccccttccatgaccagccacatctgaaaaggaaagcattctgctctttccagatctacgctgtgccttggcagggcacaatgaccttgtcgaaatccacctgtcaggacgcctaggggtctgtaccgggctggcctgtgcctatcacctcttatgcacacctcccaccccctgtattcccacccctggactggtggcccctgccttggggaaggtctccccatgtgcctgcaccaggagacagacagagaaggcagcaggcggcctttgttgctcagcaaggggctctgccctccctccttccttcttgcttctcatagccccggtgtgcggtgcatacacccccacctcctgcaataaaatagtagcatcggcaaaaaaaaaaaaaaaa

SEQ ID NO: 21875 - DNA, 714 bp, Homo sapiens
  misc_feature 1, 714: n = A,T,C or G
nacaacccttaccccagctatttaaaaattttttaatgaagaaacaggtctctttatgtgcccaactggtcttgaactcttggactcaaccatcctcctacctcagcctccccaagtacagggattacaggcgtgatccaccgatacccggtctaacctctcattttattttaaaagaataatgctatttccaatcctattgctctaaaaataaacttagtttcacagaacactaacattatcaacccattcctggattttctttgagcagctctagaattaatgttaatacccatttttcttctctgttatttactgtcatgtggtatccccaaattattaacaagtgaagcaactattattaattttaaaaagattagggttttcgaccttaatgttttcaaacctttataattggacacatctgattaaagctaaaaaaaaaaaaactttattaatctagtagaatggttcattgttgtgctttggcctgaacgttagaccaacagcctgctcagtctatatacagttttagaatatatatacctaatattttgaaattttgaaattattcacagatctgcagtttcagatcctttcaatattatagaaacaagagagtaatttagtcctacacttaatgaaactgtagtttattttgtttatactaaagaaaaatacccaataggattattggagaatctttttatgaan

SEQ ID NO: 21876 - DNA, 550 bp, Homo sapiens
  misc_feature 536, 537, 538, 539, 540, 541, 542, 543, 544, 545, 546, 547,548, 549, 550: n = A,T,C or G
acatgtgcacattgtgcaggttacaaataattattatttattgaaaaagaaactacagttgacccttgaacaacacagatttgaactgcgctggtccacttatatgtggattttttttctaaccaaaagaggattgaaaatacagtattctcaggatgcaaaatctgcatatactaagggctgacttttcacatacatgggctctgcaaggacttgcatatgcactgatttgggtttacacgggggtgatgatttggatataggcaggtggtcctgaaaccgaattcccgagcatgctgagggatgactgtatatgtgaataagacttaaattatatttccaaacttgggatggaatcaaacattttagtaacaattctgttgattacacttctatttttaatcttgtaggactgtatttattttttatttttgtgtttgaatatgtgtgtgtgtatgtgtggtgttccgggaaacaattataaaagatttgtgaataatttgggtgtatgcttttccaaatactccagtttcccnnnnnnnnnnnnnnn

SEQ ID NO: 21877 - DNA, 1085 bp, Homo sapiens
  misc_feature 1, 1062, 1075, 1079, 1080, 1081, 1082, 1083, 1084, 1085: n = A,T,C or G
ngcccctggttttttgcgccccccttttttgtttttttttttgcgaccgaatcttgctctgtcacccaggctggagtgcaatggtgcggtctcagctggactgttaacctccgcctcctgggttcgagattctcctgcctcagcctcccaagtagctgggactacaggcacccaccaccacacctggctaatttttttgtatttttagtaaagacggggtttcactatgttggccaggctggtctcgaactcctgacctcgtgatccacccaccttggcctcccaatcttatttgctttacaagtcctgcttcagggttaccttccctgaccactgctgcctccctcccagcatttgccagggactgtcattgccttagtttattttttctgttttgttttttttttgtcgtttttgtttttttttgagacagcgtcttagtctgtcgccaaggctggagtgcagtggcgcaatcaaagcttgctgcagccttgaactcctgggctcaagcaatcctcttacctcagcaactaggactacaggcacatgccaccacgcttggccttctaatttatttctgtgtcaacaaaataaaactcaggcctaggaatagcttggttcagaaatcacagagggacttagtattccattaatacaaatggaaacattaagttcatcatcagatgataaaaggaaaaaaaaaaacctgatactcatctcaaaagacgcagaaaagacatttgcataaatccagtacctattattatttcaaatctaaaaactttttcttttttaagagatagggtatcactatgttgcccaggctgatctagaactcctggcctcagatgatcatcctgcctcagcctcccacagtgatgggactacaggcatgagccaccacacccatcatagattaaaacttctgaacaatctagtaacaaatggaaatgctttcccatgatccagcacatctagcagggggtgtctgctgacattctacacaaagagacacactggagttgtgcttctcatcatttcgcacccccgcgttaattaatnctagaagtacccncgannnnnnn

SEQ ID NO: 21878 - DNA, 2061 bp, Homo sapiens
  misc_feature 2047, 2048, 2049, 2050, 2051, 2052, 2053, 2054, 2055, 2056,2057, 2058, 2059, 2060, 2061: n = A,T,C or G
gcgtccgcagctggttaacatggtgaaaccccatctctactaaaaatacaaaaattagccaggtgtggtggcacgcgcctgtaatcccagctacatgggaggttgaggcaggagaatctcttgaacccaggaggtggaggttgcagtgagccgcaattacaccactgcactccagcctgggtgacacagcgagtctccatctccaaaaaaaattcaactcttggtcttgtttctcagcacttagtttattgttattagaatttagccatacagccaactttgacaaaatgggtcacagaacaagcatgtacatcaagaggaagttccatatcccccttgtaccatttctccttgggaactcatgctatgggctaccttaaaggtaaaactcatcttatggagtctttctgataggtcactaggtaaaactccttggatagggtgaaaatggatgcacactctattacatactctggtttatcataaggaattttccagaaagctaagctttatactaataagatattggttggtagtaggaacttcaaaaatgaatgagtttgccataactttaattttctggattagaaacacaaaacttgaaatgcaattatcaatattttgtaatatatattcctacagtttgggtagaaataaggaacatgtctgctagatctggtttatgaaaaagtgaaaaatattaaatacaccagagactcaaaccctttcaaggcacacaataactgttctggatttacctgacaaacctagttgagtagcattttgacagaaaatatcagactgaaagttcattcaaatgtacttaaatgtacaatacagtgttcaatagtttttattgcagtgatgtttttccaataatttaagtaattctcttcctagtataatacagttttcataaataatgtttacttgctttctttatattttcaaataaaattaaaatgctcgagcacttcctttcagaaagttataaaattaaaaataattattttaaatgctcattcaaatgtgtctgtatacttgctatgcccctttttctataattccaaactgagactgatttttcagagatttttaactttaataattttaaatctagaatcaagtgaaacagatatgttaaatactgagtctagttttcttccatcttatggagcttcatggaataagaaactaatctagtgcaaatgaagattaaatatttctgggtgatggagagatagtcaacaaatttatttatccatcctctgcacatcagtccactggagcaggagttctacacattaaaaatgtaatgggatcagcctagcattgtttggtgttcttttgttgtattttttagaatgggggtgggggcctaagtgtccttatgaagctgtggtccacgacaggagcttgttgggggagtaccagggttctgctgctttcctgcatctgagcaacacaacagagatcatcagttttaaatagagtagccctcacaatcaaaatatcatagaatatattgtaaagttatgttgctaattttcctttgaaatataaaatattttaagctttttgtcaaaagtggtaacatcttaatacaaataaaaacctttttgtggttgtaagatttagcttataaatcattcaaattgaagtgaaagaattaccaggtcattgttaatgacttagtctattaagaatatatgtatttttgtaaaggaaaagcacttgtagatatttaatcagtacaagatatgtcttttgcagaaataaaatgctgcttagagattctccttaaatattttttatttttgtgctcaaatgtattttctgttgatctatggaatgttctgtacaaagctgtataattgtactgttgggctagatactttttttttttaatctggacttagccaagtatatttcaccatgttaaaatacagtatctttgttattaaaaattaaattgcataatttattattgtttgtcatctttaatattagtcactgtagattgcagccttcattaaaaatatctccnnnnnnnnnnnnnnn

SEQ ID NO: 21879 - DNA, 1289 bp, Homo sapiens
  misc_feature 1289: n = A,T,C or G
acgagtccctctgaaaattgtcagtgttccttcagttctctttgggtcaacttcagtctaagaatggtcttatgccagtcaagctgtacgcgggcaacaacagccagcggctcctcaatgtcatcgacatggccatcttcgacttcttgatagggaatatggaccggcaccattatgagatgttcaccaagttcggggatgatgggttccttattcaccttgacaacgccagagggttcggacgacactcccatgatgaaatctccatcctctcgcctctctcccagtgctgcatgataaaaaagaaaacacttttgcacctgcagctgctggcccaagctgactacagactcagcgatgtgatgcgagaatcactgctggaagaccagctcagccctgtcctcactgaaccccacctccttgccctggatcgaaggctccaaaccatcctaaggacagtggaggggtgcatagtggcccatggacagcagagtgtcatagtcgacggcccagtggaacagtcggccccagactctggccaggctaacttgacaagctaagggctggcagagtccagtttcagaaaatacgcctggagccagagcagtcgactcgagtgccgaccctgcgtcctcactcccacctgttactgctgggagtcaagtcagctaggaaggaagcaggacattttctcaaacagcaagtggggcccatggaactgaatctttactccttggtgcaccgcttctgtcgtgcgttgccttgctccgtttttcccaaaaagcactggcttcatcaaggccaccgacgatctcctgagtgcactgggaaatctgggtataggtcaggcttggcagccttgatcccaggagagtactaatggtaacaagtcaaataaaaggacatcaagtggatacctgacttctcaggatccttattctagctacaagtcaaagataactcctggtccagacaaaacacctggcctatcacaagctgactaaaaatctgcactttgggccagcgcaggcaacagtaactctgacaggttcaaattagacctcacactttctactcatattctagtcactggacccatctgaatcagtaatccctactgcccggtcctggagtaacttcttagagatattataacaagtggcaaaaataaaagagggatttgctaagaatatcagaaaaggagtgttccaatttgaagagtattacaattgaaataacatcaaatatgtcacactaagcagccagtaacagaataaataattacaacn

SEQ ID NO: 21880 - DNA, 4893 bp, Homo sapiens
cgtccgccccgcgtccgtgaggtcaggagatcaaaaccatcctggctaacacagtgaaaccctgtctctactaaaaatacaaaaagttagttagttagttagttagccaggcgtggtggtgggtgcctgtagtcccagccattcgggaggttgaggcaggagaatggtgtgaacctgggaggcagagcttgcagtgagattgcaccactgtactccagcttgggcgacagagcgagactccatctccaaaaaaaaacaaaacaacaacaacaaaaaaaaaacactgtatgttaagggagactccttcagtatctaagagcacttgggggtggactgggggagaagggatgacttcatttacccccatagttatggagtcttgagttctaagaaaattttcatccctattgatttttatgctaaaaacagaatcttacaaatgtgatagctatatatccaaatgaggtggtctagtacaagcatttctgaaaaaatttttgaatgacaaaattttatcctaagcgatatgttttccaagtgaatataattctagtttaacacaacattgcaagtcaggtgtgcacattttactaacaaacatatatcaatgtgatttcagggccttctccagaagcaaaaggagttggaaagtagtctcctgcctttagctgaaaatcaagaagagagttttggttcttcattttaaatgtagaaaatcaaatccttcacatttgatttgtgtcttccaaattataaaatgtgctcactggctcaactgtatttttcaaatagcctagatttacttatttttttaaatgctcattaaaaacttgtatactatgtagtaaaatgctgtacttgttctatacaataaaacagatacttcttttgtaaaagcttagtagtaaaaaaaaaaaaaaaaaaccggttcttctgctctgtcaccacctgggtattgaagccctataaaaacactttctacttaccttaatatagtctggcgttgctgggacctcacagtgttctttcacactttttatgtaacttaggaactgaaataccactcatgcatttgttctaaagtgccaaagttctgtctaacttattaacacgtctagacccataactccataacttttactgaaataacacaaattcagtttaggctccttctctaaatcctgacatttatttgcactatgacatttatttgtagaaattgcaattttcaaaaacatttttaaaagttagcattagtaacaagttagtaattagtattagaggcagtagttaggaatagatacgggtttgaaagctatctccactgtatctgtctagtatagcattaatgtgttcaacaaatggtaattactactaagaccacctcaaaaatatattcccattatacttccattttgctaaaactaatttaaaaatcaaattgttcaacgcctttgataaacagaagcctatcttttgaaataaaaaatttaatttcattaaatcaaggattgcgcaggtactgaaaattatccaatactctcaaaaagttaccagaattttagcaataggcagtttttacatgactaagcctagagataaaaaatgtgtcctatgtacatagtttattacctaaatgaaactgcactgttagataaatcttgaggtatcgagccaaaatcctgtaaatattaacactgctattactgacttatacctgtgtaaacacagtatacaaaagcctacatcaaaataattcacttcaacaaaagtactttatatcaggtgacattagagaaaaagaagtaaagcctttgctgtttaccgtcctcctgcaagcatctgattttacacataaaacaggcttcaatttgaagcctaagtacaggtaacatacaaaaagtaaaacttagaagtgccaacatgagataattcaagtacaatatatgttaaaaatatatatttatttcaatttttagatgcttcaactgttacaggccatcatgatttaaataaaagaaaaaacatttgagaaagaacaagaaccttttgtttagagaatgaaatataaattgttaataaacaaagtccacaacaatctcttaaaaaaaaagttactacagttatttctcttgtgaatatggcctggaagaatcacttttcccccaacttaagggaggtggagatttatctctatccaagctttcagtataagcagataagaagtaattctcattttcttgagactgacttgatgaaagggcatatggtgtccccaaaaatgtctgatgagtgagaacattaaaatgactaaactgatgggacatatttaattgactatgataaacctgaaagttactatatgaatcttgttctgttgaattgctgttctctccttcagagcatactatatcaatagaagttctctcttcagaatcaaggtaagtcttatcttctaataaactgttttgcacatcaggagacgattgcaactcaatttgagtattctttttttgatctgttccacgtgatcctttggtctctttctcccatatttctgaatgaaaattgctgcatacttctatatgtgagatttcatcccctgaatccagagacatatcctcttcatccttttcatcgttttctaaaagagctacatttaaaaaacaaaaagtcctcctctattgaaatacacagtttgtttaagttttaaaattatacactactcacacaatataacgcgtcagggtctgcaagtccacaatcccttaaagcttggtcttctgccacaagttcacttagtcacaacactcacactagatgtgaatgtccagataatccgatgctaaaagcttctgcgaaatgtgttcacgtttaatgttgggaaatcccaactcccagctccaaaggggttaatgtcaaaacagcatctgactgcgactcaagattctcattagcaccaagctgtggaaggttttcttctgtgattgaattgtgatagcccacaagatttttaaagttttgcatgaagtcttcagcagttgcaaccactattccattatctgtataactggaaagcatcttgatgttcttctctgttaaaaagactatgtgtcgttgctgtatgttctgagcctgaagtctgataaggcaatccaattctggagcatttcgagtttgtgaatcacaattgtggtatgacaaaatttcaaccagatgtttcttctgatagacattcagaagcgtcaacagacttagagctttagcattcaatctgcctagttcctttagtttcttctgaaatttacagtggactttccattgccattttccttctggagtactaagttcctcaaggaatgtcaaaaaatttttaaggttctcaactgtgacaacctctgggtttagaattgattcatcagatacgataaaacctccagatacaaataattcattgtatgtatgatttttaacatcatccaggctatcaacaccagcaaaactaacacaggggagcttctttaaagtcaccaagccaggtatcttgtgaatgaaacctgcaatgtcttcattttgaataataatcaatagtttatctaattttgatcttctttccaaaaactgttcaggatgacattctgtattgcctaatttgataagatattcctttatttctttacagagcacactctcttcttcttcatgaatataaaatttcacagtatttttctggacgtctttcatgattttaaccaaactattaaatacttcaggttctaactggcttataaaatttgaaagagctggttgagcagaaatgtttacatcactgggggattttgttgtttcttctactggttcccgggccatatcaccaggtacaatatgatcagaagtcaccattaactctgtggcatgttgaggctggttcatttctacttcagttaaagccgaagtggaatgctgctcatcagagttggtatctttcaaaggatcactacacagtggctcaaggagatgtttattgttgaagtcacttgaggaaactggtatgacatgcctttccagaggattcgatgctatcttagcaccagaatcgttaggactgactggtggcaaattcccacccttggctgatgctttaataataatagtatttagcttctcatgcaaaccatctacaaactcctgcacaccagctttggaagtcttagaatatatgaactcggaaagccgtttcatcttctcttgtgttgaaaagataggtgtggaaactctactgacatatgaaacattcttttgcttcaaaatctcttctatcttcctagaaaagagattgtactctcctaacactgtcctctctgtggtttcgctcactgcaggcggctctgcctctgctgctggcacacactgctcctccacctgacctgtcaacacgtcatcctcagtggtgccctttagtgtgtctgtaaatggagaggatggaaactggtaatcagaacttctctgtctatttattacccgggggtcgttaggaaaggcctcctgtggtggcacacacaccagttgttcttctggtgatttcatacctggtgtttgtttctcaccatgtttccccagctggtcttctgggcttcttgcattccctcctgtaattggaatcagtttccaatgtatttcagtctcttcaacattatttgacttagactgttgtctacgaaatccatgttcaatgggaacactgggacacaaactgcaatcttcaaaattattcacgctaattaaatttggatcttctttcaaatgtagcttatggtcagtgcccacttcgctggtagaaatagcaacagaatacttagatgttgcatcaacttctagtaataagctctgagt

SEQ ID NO: 21881 - DNA, 435 bp, Homo sapiens
  misc_feature 430, 431, 432, 433, 434, 435: n = A,T,C or G
actcaagtaacagagttgaaccttccttttgacagagccgttttgaaacagtctttttgtagaatctggaagtagatatttggatacctttgaggatttctttggaaacgggatatcttcatataaaatctagacagaagcattctcagaaacttctttgtgctgtatgtcctcccgcgtactatcacagaagacaagaggagctcaagagattggaagaaaatgatgatgatgcctatttaaactcaccatgggcggataacactgctttgaagagacattttcatggagtgaaagacataaagtggagaccaagatgaagttcaccagctgatgacacttccaaagagattagctcacctttctcctaggcaattataatttaaaaaaaaaaaggccactaactggcctctgtaaaagatgttaacannnnnn

SEQ ID NO: 21882 - DNA, 687 bp, Homo sapiens
tgatgatgcagaggattttattaggcagtggaagtagctctcagcagaaggggagctgaaaggggggtgcaagaagaaggtgatctttccttgaagcctggtcgtctccatctgggctcctctccaaagttgtgccgtctgaagttaagtcacatctatccatagtctcagatgcccagttgcttcttcacctcttgatattcagctgcttgtgttgctctgccagctgaagtctgttgtgggcacagaataggggcagacttatgatgtgattcaggttacagaacttgaggtcagaggattctcctgaatgatgtagaggctcccaatcaaatcacaggagtccttagaatggagaatctttttggctgcttctctgtgccacctaaatcagagtagcttcatttttgtagttgctcccagcatcaacttctccttgataaactaggtggtgagtccatgaggtgactggcatagaagacctgtgtatctcatagtccctgagttaaaaggaagatggcggcattgattcaaggtagggaatcatgaatatcctgtaaaggaaccaccattgtagcaggacgagctgcagacaaaacccctcagacaccgagttgtagaaggaagggctttattcagctgggagcatcagcaagctactgtcttaaaatctgagctcccccgcgt

SEQ ID NO: 21883 - DNA, 4568 bp, Homo sapiens
acgcgtccgcctgtagcagattgggtttcaaaaagttcggatgtaaacattgacatccagtttccagccattatgtctcagccagatgtcctcttacttgttcaagaatgtttaaagaacagtgactcctttattgatgttgatgcagacttccatgctagggtgccagtggtggtgtgcagagaaaagcaaagtggtcttctgtgtaaagtgagcgcaggaaatgaaaatgcttgtctgacaacaaagcatttaactgcccttggaaaactagaaccaaagctggttcctttggtgattgcatttaggtactgggcaaagctttgcagtatagatcgccctgaagaaggaggtctgccaccttatgtgtttgccctgatggccattttctttcttcagcagaggaaagaaccccttttgcctgtatatctaggatcatggattgaaggattctcattaagcaaactagggaatttcaaccttcaagacattgaaaaagatgttgtgatctgggaacatactgacagtgctgcaggggacacaggcataacaaaagaagaggcaccaagagaaacgccgattaaaaggggacaggtgtcattaatattggatgtgaaacaccagccttcagtaccagttgggcagctctgggtggaattgctgcggttctatgctttagaatttaatttggctgatttagtgataagtattcgtgtcaaagaattggtatctcgggaattgaaggattggcccaaaaagcgcattgccattgaagatccctactctgttaaaagaaatgtggcaagaaccctaaatagtcaacctgtgtttgaatatatacttcattgtttaaggacaacatacaagtattttgctcttccacacaaaattacaaaatccagccttctaaagcctctgaatgcaattacatgtatttcagaacattctaaagaagtaataaatcatcatccagatgtacaaacaaaagatgataagctcaaaaactcagttttggcccaaggtcctggtgctaccagttcagctgcaaatacctgtaaggtacagccacttactcttaaagagactgctgaaagttttggaagcccaccaaaagaagaaatgggaaatgaacacatcagtgtccaccctgaaaactcagactgtatccaagcagatgttaactctgatgattacaagggtgataaagtataccatccagaaacaggaaggaaaaacgagaaagagaaagttggaaggaagggcaagcatctgttgactgttgatcagaaacgtggagagcatgttgtctgtggcagcacacgtaataatgagtcagagagcactttggatttagaaggcttccaaaatcccacagctaaagagtgtgagggacttgccactttagataacaaggctgatcttgatggagaaagtacagaaggtactgaggaactagaagactctctaaaccactttacccactcagtacagggccagacatcagaaatgattccctctgatgaagaggaggaggacgacgaagaagaggaggaggaagaagaacctaggctcaccattaaccaaagggaagatgaagatggcatggctaatgaagatgagttagacaacacctacactgggtcaggggatgaggacgccctatctgaagaggatgatgagttaggcgaagctgctaagtatgaagacgtgaaagaatgtggaaaacatgtagaaagagctctcctagtggaacttaataaaataagtctcaaggaagaaaatgtatgtgaagaaaattcacctgtggatcagtctgattttttttatgaattcagtaaacttatcttcaccaaaggcaagtctcctacggtagtgtgcagcttatgcaaacgagagggtcatctaaagaaggactgtcctgaagacttcaaaagaatccagctagaacctctgccaccattaacacccaagtttttaaatatcttagatcaagtctgtatccagtgttataaggatttttctccaacaattatagaagatcaggctcgtgaacatattcggcaaaacctagaaagtttcataagacaggactttccaggaactaaattgagcctgtttggctcctccaaaaatggatttgggttcaaacagagtgaccttgacgtctgtatgacaattaatggacttgaaactgctgagggattggactgtgtcagaactattgaagaattagcaagagtcctcagaaaacattcaggtctgagaaacatcttacctattacaacagcaaaggtgccaattgtgaagttcttccatttgagaagtggtctggaagtagatatcagtttgtataacacattggcccttcataacacaaggcttttatctgcttattccgccattgatcccagagtgaagtatttgtgctataccatgaaagtatttacaaagatgtgtgatattggtgatgcatctagaggcagcttatcatcgtatgcatatactcttatggtgctatattttctccagcagaggaatccaccagtcattcctgtccttcaagagatatacaaaggtgaaaagaaacctgaaatatttgttgatggctggaatatttatttttttgatcaaatagatgaactgcctacctattggtcagaatgtggaaaaaatacagaatctgttgggcagttatggttgggccttcttcgtttctacacagaggaatttgattttaaagaacatgttattagcatcaggagaaaaagtctgcttacaacttttaagaaacagtggacctcaaaatacattgttattgaagatccctttgatttgaatcataatcttggagctggattatcaaggaaaatgacaaattttataatgaaggcttttatcaatggtagaagagtatttggtattcctgtcaagggatttccaaaggactacccctcaaaaatggaatacttttttgatccagatgtgttaactgaaggagagctggccccaaatgatagatgttgtcgaatttgtggaaaaatcggacacttcatgaaggactgtcctatgaggagaaaagtaagacggcggcgagatcaggaagatgccctgaaccaaagataccctgagaacaaggaaaaaagaagcaaagaggacaaagaaattcacaacaagtacacagaaagggaggtgtcaacaaaagaagataagcccatacagtgcacacctcagaaagccaagccaatgcgggcagctgctgacctggggagggagaagatcctcaggccaccagtagaaaaatggaagagacaggatgacaaagacttaagagaaaaacgttgttttatttgtggaagagaagggcacattaaaaaggaatgcccacagtttaaaggctcttcaggtagcctttccagtaaatatatgactcagggaaaagcctcagcgaagaggacccagcaggaatcatgagggaaggaaaatgcagcactctaaatggccactcaggcgttcctattcactcggaaaattaggttcatttcacaggacacagcagtgtagatcaggcttcaacttaacatttaagggaaatgtcagatttttttttaatttaatgaaattgttaatggggaaaaatttttaatatagtcttatctaccacacatcgccatagatttaaggattttaatagaaagacatgatgtatgtatttaagccacgttaaaagaaaaaatataactatggaccggtattcagtgaatacagtttcatggtttttaattctttcaaagcacattaaaaatggtgtgctgataaaccccaagtaaattaaccctttttccgtataaatccattttttgttttgaagaggggaaattatatttattgttgtttactgaatcctggtgtgaaagcatatcagatatgtatgaactgctactgctgtacttccgatttacggacatcattttattgctatttgtagacgtgataacatgaacatgagtacctatttatgtgggccttcagtggatgggcagtgccactcaggtctctggggtttccctctctaattttaagtaaattgacatataactactatgcttataaaaatgaagtaaggaaaacaagtagtcctgtttgccactaaaaacattttcaaagtaaaaagtactttcattttatgatactcagaaattaggatgaagaacttttaaaattgctgaagatcaaagaggttatctctgccagtcacaagtgtggctggtgtcattctgggtctgactggagccctcctggactgtttctttaatttcaaaagccctgcagacatagtacctggtcagaactatgcctcggtttatttatcattttgaaataaaatcagaatttctgtgcccatttcattgacatgcgcacagaaattgaaggacgaggatctagaaaggttaacaacaagaaattgataatgccagagaactacaagaacagagggattctttgacccagacactacaggaagtacaagttcggaacaaagacctggagggacaactgtctgacttaga

SEQ ID NO: 21884 - DNA, 1289 bp, Homo sapiens
  misc_feature 1: n = A,T,C or G
ngagatatggtctagctccgtcgaccatggtggagtgcactgatgctgtcttggctcacggcaacctccacctccagggctcaagccatcttcccacctcagcctcccaagtagctggaactacaggcatttgtcaccatgcatagctcatttttgtattttttgtagaaacaggattccaccatgttgcccaggatggtctgaaactcctgagctcaagcgatccacctgccatgactttccaaaatgatgggattacaggcatgagccatcatgctggccttggatgtacttttcttttcttctttttttttttttaaccatctcagcaaatacatggttcttaaaaacatacatgtccatttctatgtctcccacaaaacatctgagtaattacctccagacaatgtgtgctaaacttcgagttttgaatattgctttaaattattgctaccacttgtatatgactttattgtttaccaagcacttgtatatattacctagtatgtacaacaacacggtaaagtatgtatttatcagaaaaaataaccaagattcagaaaaactacgagaattaaataaggtcactcaccttgtaaacgatatagccaggttttacaacgaggtgcgctcaatcacaaagtatatgcttttccccaatatcttctttaactataaacatttatttaatgcccactaattgccaagaattgtgctagaaactttcaaattttgtcttactctggtaattttcatgaggattacgtatgtatcatgcttgatagtttattttcaaagtttagcagccaaggctttatttactctaatgttcctgccagcttggcccacattcaatgcttataaataaataatctcatttcggctcaagtatgatgagtatcctttccatactgaccacagttctaattaaagtgaggtcaactacaacaataacaaagttaatataggaactatactactcaataaagaaggcaaaaatgttcccaatttaaacaatttctgaatttttccatgaagacaggcagttccaactgtcaaaactgtcccatataattaatatttattattaatgcagacactttactgacagagaaaagtatttattcagagctactaagcactagtctaactttacatctaacagggaaaagagttgttcaaggcctgtccctggctgacaatggtcaccggggcagaggcttcagctactctctgatttagtattcttcagttgttcaaaattaaaaaaaaaacaaaaaaaaaaaagt

SEQ ID NO: 21885 - DNA, 1655 bp, Homo sapiens
  misc_feature 1, 2, 3, 4: n = A,T,C or G
nnnnatatcttttcaccacttgaatatactgcaatgtgtagtgagtaaattgtctccctttttctatagatcattaggttagagtttttttcttcttttttttttttttttttttttaccacttctgctgttcatggtagtagtggaaggtaaatttggaaatggcattgacataaaatgaaaatgtttacggacacttttcttttttgcttttttattgtatttggataaagatccacttaaaagttatctgttttttcctgtttttttttttttttccccaaagtgtagttatgttttcactattgctgcttctatagagggcattgtgatagagagttacagatgaaacattaaatgccacagtgagtagaaataattactacaaaaagtaataaatatgattacttggtaatatcattctccatctaaaatactagtttcacctgtgagcagatttcagctcagtttatagttaaaaacaatgagggtaaaatgggattcatgctcagggaatgaatcagccatagttagagtgggaaattattattttcttcatttaaaggtagattttatgtttatttccctaaattgcataagataaaattgtctgtttaataaaaagacatttattaccattattaacagtcattttagagccaaatttaagaaaaggatattgaaagggtctttattggccttgtttgggtaactctatgctgttagatagaagagacttaggtaaataactttttatgtctgaggtgagtacacaatattggttcttggaaaaatagctgtttcttcataagatacccaagtgataattttttttcccctagactgtcaggcctatgagtaaatactaaatctattagctgtccccactcataaaccaaaccaaaccaatacaaacagatgaggagaggaaatgtagtaaaaatactggctgggtcttatgattgggatgagtgattttataagataatatggtgataattttattctaggattttatttttggcctaatataggaatgtttaaaaaaggcttttctatgaaaattagaaatttatacttgaaattaaaagtctagaagggggaggaccttaaagctaagctaccagtaagacaatgaataattcagaagagaacactattcttttactgactgagtgcccaagatgccaatttccatgaagtcttgatttatatatatgtacacatgttatgcacatacatgtttgttttctaacagttattttttaagcttttgagataattttagacttacagaagagttgtaaaagtagtagagttcttgtatactctgcacccaccttgcccttatgttaacatcttacgtaacaatagaacatttgtcaaaattaagaaattaaccttgatataatactaactaaagtagaaagtttaaaaagtagagattttagtcttttcactaatgtccttttactgttccaagacccagccttgcatttagctatcatgcctacgtcctgtcttccagtctgtgacagtgtatcataacaggggatacctgatgttgtaatgtatttctggtgttgttagccttgatcactatgctaaggtggtgtctgctaggattcgctactgtaaacttactgtgttttcct

SEQ ID NO: 21886 - DNA, 399 bp, Homo sapiens
  misc_feature 397, 398, 399: n = A,T,C or G
actcccaaagcccttgccatgtaaatgccaactatgtctgtgtgaaataataacttggaccatcttaaggctttttttcacaaagtccttgtggaatttgaaatcatttttgtgactgctgagaatgacatttagagactataacatttccttttattcactttttttttttcagtgtttgaaagatgtatggtgatcttgaaacctccagacacaagaaaacttctagcaaattcaggggaagtttgtctacactcaggctgcagtattttcagcaaacttgattggacaaacgggcctgtgccttatcttttggtggagtgaaaaaatttgagctagtgaagccaaatcgtaacttacagcaagcagcatgccgcatacctggctctttgctgannn

SEQ ID NO: 21887 - DNA, 415 bp, Homo sapiens
  misc_feature 1: n = A,T,C or G
ncattagtgatcactttggcctctccactgtctctgatgcttaccagcaaagagaaaacataaagttctacattcagcaggacattcacctgaacagtttcaaataggacatgaagaaactacaagcagagacattccacaaggtggtccccacagccagtgttcccaggtccgctctggagggacacagctgcaactcagacccccataggatccccacttgagctcaccatcccacattacaaaatacacaaaagaacaagccaccatgagatgcagtcttcagaaagaacccatggaagagtcagacctcaagaacttcagacaatttcctttatgtagtcgaaatgccaaagactgtatggtttcctactaccatttccaaaggatgaaccacatgcttcctgaccctggt

SEQ ID NO: 21888 - DNA, 439 bp, Homo sapiens
  misc_feature 127, 128, 129, 130, 131, 132, 133, 134, 135, 136, 137, 138,139, 140, 141, 142, 143, 144, 145, 146, 147, 148, 149, 150,151, 152, 153, 154, 155, 156, 411, 412, 413, 414, 415, 416,417, 418, 419, 420, 421, 422, 423, 424, 425, 426, 427: n = A,T,C or G
  misc_feature 428, 429, 430, 431, 432, 433, 434, 435, 436, 437, 438, 439: n = A,T,C or G
acacttttattactgattaatttcaaagctttttattggtctgtttagggtatcaattccttcctgtttcaatcttagggggtcatccagtttgtgtgcatagatgtgctcataatagtctctgagnnnnnnnnnnnnnnnnnnnnnnnnnnnnnnctgtgtggtcagtggtaatggccactttgtcatttctggttgtgttttttcatatattctcttttttatcttgattagtctatctagcagtctaccaatcttattcattccttcaaagagctaaattttagttttgttgatcttctgtatggttttttcacatctcaatttcactcattttaaaacccagtttggttatttcttttggtatgggagcattgggattggtttatgcttgtttttcttttttctttnnnnnnnnnnnnnnnnnnnnnnnnnnnnn

SEQ ID NO: 21889 - DNA, 2147 bp, Homo sapiens
cggagtcacccacgcgtccgcggacccctggggggaaatgggtgggacagaaccgccaccacccgcgctgtcgggggcctcctcgccggctccgtgtaggtcatcctgtgttccaaaggcatcgttgttcgaccaaaggaatctcgtgaaggaaagtgggccgagtggattgtacagcctctacaatatgccgaaaaatgccgggtctaagttgtagattttatcaacacaaatttcctgaggtggaagatgtagtgatggtgaatgtcagatccattgctgaaatgggggcttatgtcagcttgctggaatacaacaacattgaaggcatgattcttcttagtgaattatccagaaggcgtatccgttctatcaacaaactcatccgaattggcaggaatgagtgtgtggttgtcattagggtggacaaagaaaaaggatatattgatttgtcaaaaagaagagtttctccagaggaagcaatcaaatgtgaagacaaattcacaaaatccaaaactgtttatagcattcttcgtcatgttgctgaggtgttagaatacaccaaggatgagcagctggaaagcctattccagaggactgcctgggtctttgatgacaagtacaagagacctggatatggtgcctatgatgcatttaagcatgcagtctcagacccatctattttggatagtttagatttgaatgaagatgaacgggaagtactcattaataatattaataggcgcttgaccccacaggctgtcaaaattcgagcagatattgaagtggcttgttatggttatgaaggcattgatgctgtaaaagaagccctaagagcaggtttgaattgttctacagaaaacatgcccattaagattaatctaatagctcctcctcggtatgtaatgactacgacaaccctggagagaacagaaggcctttctgtcctcagtcaagctatggctgttatcaaagagaagattgaggaaaagaggggtgtgttcaatgttcaaatggagcccaaagtggtcacagatacagatgagactgaacttgcgaggcagatggagaggcttgaaagagaaaatgccgaagtggatggagatgatgatgcagaagaaatggaagccaaagctgaagattaactttgtgggaaacagagtccaatttaaggaacacagagcagcgcttcctggctgtaaatcctagacttgaaagttttccagtattgaaaacttcaaagctgaatattttttatttctaagtatttaaatgttctaacagatcagaacatgaaatgccctcctaaatgtcagctgttgtcacacagtagctccaacactttgagcatttttaagggagtggcctcatttcactagagacaaatctttaagaatagttctaaaattgggcttgtgatttccatttctgatgtctccagattggcacccctttctagttcaatgcctcacgagatttgccaggggcatccaaggcaaacaatcccaatctttctatataaaatgtattcaagcaaacatcaaataaatttctgggatatttaactataggcttcttccttcttgtcaccagttaaaagcattttaatactaagaccctaattcttttatctttattttagtcttgatgtggaactgtaggagcaggtgaataaaggatctctataacagatcctttcaaaagaagagttttagagaaaataaatttaactttaaccacagtgaaagttgacccttagcgggacaaagccttaaaatgcattgaaagaattagatccgcgcagggcgctttaaacacatcgggaaatgttgcaccccgtgtgacaagaagtttcaccccacgccttcgggggcaataaagacaaattggcagaggatataaaaacgggggcgacacgcgccagattcagaaagaaacagagacggttataaaggtggttttacaccgatattaatagggagaaaaatctaagagacatgagaatggtcttttaaaagggaaggtagaacaaaaggatggaataaatacaacattagtagagagaaagaaagtaggagaaatgaatacaatgatgatagatagatgtagcttatgtaacgcaagatttttatctttgttttctttta

SEQ ID NO: 21890 - DNA, 786 bp, Homo sapiens
  misc_feature 1, 2: n = A,T,C or G
nnccaaggcgattagtttgggaacgccagggttttcccagtcacgacgttgtaaacggacggccagtgaattgtaatacgactcactatagggcgaattgggtcccgggccccccctcgagttttttttttttttttttttttctcagcaaggcaatttacttctgcagaagggtgctgcctgcatcaatcatgatcacaggagcacactgaacaaaggaaggaaaaggtttttatccctaacacagtccctacctctgtgtcactcccccaggggctggggttggaccgctcattctaagttgacccgattggctatttgtgaatacttttccaaataaggaagggaagggggatgtgagttacagtggtgggaagtgcagtttcagtgggaagaatgggtgcagagtgggtaaccaagggagcagatgtgagttattgattagaactggtgggaaggttgttcacagtaactagggacaaggaggcatggacaacaaggaagtcgagtttgagaacaaagaataaggaagtcaacaggctaaatctttgaagaggaatttactgtatcttataatttccccctttcaattgttatggtccttcctcttcaaacctttttaacaagtcttggctttgctgttcgacttgatcctctaaaaggaaaagcttatctgaataaggtggaggagagctaagggaggttttagtaagtactgtttctataagcctctgtactagcccacggatacatggtgtgacacaacacccaaaaagaatcggacgc

SEQ ID NO: 21891 - DNA, 918 bp, Homo sapiens
  misc_feature 1, 917, 918: n = A,T,C or G
nagcggccgtccgcgcgggcacgcggggcttggcctgttgcttcagcctgagctcggttagggcctcacttccctgcttccacacctcagggaggcctcggtgattttgccagagcctcagcctccatcgctctgtaacctgcgggtattggatgattcgtagctaagacttcgcgacacccttgaagctgagaaatggaacccttaacattcagggatgtggccatagaattctctccagaagagtggaaatgcctggaccctgcccagcagaatttgtatagagatgtgatgttggagaactacagaaacctggtctccctagaggaaggaacagcagccacagagaacaaatgacttgctcacaacagaagagccagtagtaaaacacaggtgtctggaacatgaagctatggaacatgaaatcatgaatacaagacccagttttcagaatctctccacgaagtagaggaactcataccaatccagaagagcctgacagaagatgttcaagctgaaagagtccaagcagcaaatgcactcactactccaaacttggaggaggaaccagtcaataactgctagctgttacacaaggaatattatgagacacaagaaagttgcttttcaacaacaaagaagcaaagcagccatcagaaatgttcgctcgtgttcaacacagttgaagctctcggggatttattagggacaccaatggcagctggcaacagtacttccattcaacgctggataacggggtgctcacaggtgccaactgcaggaagtggtgggtgtacaagggcaacagacgctccgcaacgccacagcctgactaccgctccatcttggtctctgcctaccggaaacaccctgtgttccaccttcccgcaacgactccgccgctgcccctcacgccnn

SEQ ID NO: 21892 - DNA, 676 bp, Homo sapiens
  misc_feature 1, 2, 3, 4, 5, 6, 7, 675, 676: n = A,T,C or G
nnnnnnncctggtacaggattttattaaaattgtacatagatctcatatttaaattaaaaaatggactttttttctagtatcaaaatagttatttttaaaataccttgaaaaactttaatacaatttttaatatattaaatattcacctgaactctcagccatttatctcccatctctctttgctagaatcttgccttaccatcactatcattcttttgtttttgttttctttttgggcatctttaatgcttatcccaggaaaaggcattaaaaataaaatatttttctttaaggtccacaatttaaaaaaaaaagaaagaaaaaggaaaagccattgacagtatttgacacgacattgaagattcttattaaaccagcctcatcttgtttgcccacatccaaaactctttagtaaatatcagttcttgccctgaaactggtaatactgacccaatagcatcctctagtggccaaactgtagcaaagcacccaatgatgcaggaaggttttcagaccttgggttatatggaccttgggtgttggaagtctagatatggagaccccccaccacaaaaaaaaaaaaatttttttttagagattacaagacaacgggtttcctggaaacccattctcaacatgagctgcctacagttgcttggcaaagtcccaagaann

SEQ ID NO: 21893 - DNA, 1664 bp, Homo sapiens
  misc_feature 1664: n = A,T,C or G
actgttaggagtatactgcttacaggtttagatatagtctgttagaattaaaaccaagtttagtgttcatatttacctcatgggctttatcaagcccagttattattatttaaaattacttcaactttgtgtttttaaatgttttgacgatttcaatacaagataaaaaggatagtgaatcattctttacatgcaaacattttccagttacttaactgatcagtttattattgatacatcactccattaatgtaaagtcataggtcattattgcatatcagtaatctcttggactttgttaaatattttactgtggtaatatagagaagaattaaagcaagaaaatctgaagtattgtcttgtttttaaaaaatacagttcctagtgtttttagaagtcacttaatttgtctcatttttccacctggaaattaggaataatgtagaatgcaaggcagtaatttccttttggaaaggactctgaaggcagaaaagaagggagagaacctcatgggcagaatattataaaaagagtgtcatattccagcatttgaattggaaagagaagagtgaagatccaagttgcattattaatctgccctgtgttttttccttttaacaatcagtttgagctgctgctgttatgagtttctcatcaagatgaaagccctaatatgtaaagtcaaatccgatttaaattttgtgcttttatagaaagaaatttcttcatagacgtggtgatatatcatttgttggacctgctaatagtaggtcaaaggggagcactccttgccccctgttcctgggtttatgcagttttctttttagagtttatatagggcaagtggttctttttctctgaattacaggatggaaaaaggtcatatcctttgtcaggaaatataaacttgaaagtatgtagtcagctcttgtaatactcatatttatgattgtcctatatgaaaaacaacttcagttaaaactataatgtgtgattctgtataacaaggtgatgtctgtttcccagggctcagacctaatccagttataataaaatcaattaaatgaaatattctatagaatcgatctatgcccttgttaatctccatccatataggagtcacgttctttaagacagatggtggtagttatttttgtggcatggttagatttgactggttttgcagaagattacagttatgtactgcataatgacatatacaatagtggtcccataaaattataatggagcagaaaatctattgcctcatgatgttttagccgttttaatgtcatagcctagtgcattactcacgtgtctgtggagatgctggtgtaaacaaacctactacactgccagttgtataaaagtacagcacattcagttatgtacagtatgtaatactgataatgacaataaatgacaccggtttgtgtatttacttcacaaaaaaaaacaaaaacaaaaagaacaagaagaaacagggcgggggcaaaaaaaacaccgcgggggcccacaaaacagacaaccccaattccggaaaacagggggccaaacaggagcaccaaaaagcaaaacggggcggatacaaaaaacaaggaaaaccgagacagcatagaaggaccgaaccgcaggaaagagacaccccaagtagcaggcgaacn

SEQ ID NO: 21894 - DNA, 4853 bp, Homo sapiens
  misc_feature 1, 2, 3, 4, 4827, 4828, 4829, 4830, 4831, 4832, 4833, 4834,4835, 4836, 4837, 4838, 4839, 4840, 4841, 4842, 4843, 4844,4845, 4846, 4847, 4848, 4849, 4850, 4851, 4852, 4853: n = A,T,C or G
nnnnggcccgcggccccgggacgcggggtttcttgggagcgccagttccgtctgtgtgttcgagtggacaaaatggcgaagatcgccaagactcacgaagatattgaagcacagattcgagaaattcaaggcaagaaggcagctcttgatgaagctcaaggagtgggcctcgattctacaggttattatgaccaggaaatttatggtggaagtgacagcagatttgctggatacgtgacatcaattgctgcaactgaacttgaagatgatgacgatgactattcatcatctacgagtttgcttggtcagaagaagccaggatatcatgcccctgtggcattgcttaatgatataccacagtcaacagaacagtatgatccatttgctgagcacagacctccaaagattgcagaccgggaagatgaatacaaaaagcataggcggaccatgataatttccccagagcgtcttgatccttttgcagatggagggaagacccctgatcctaaaatgaatgctaggacttacatggatgtaatgcgagaacaacacttgactaaagaagaacgagaaattaggcaacagctagcagaaaaagctaaagctggagaactaaaagtcgtcaatggagcagcagcgtcccagcctccatcaaaacgaaaacggcgttgggatcaaacagctgatcagactcctggtgccactcccaaaaaactatcaagttgggatcaggcagagacccctgggcatactccttccttaagatgggatgagacaccaggtcgtgcaaagggaagcgagactcctggagcaaccccaggctcaaaaatatgggatcctacacctagccacacaccagcgggagctgctactcctggacgaggtgatacaccaggccatgcgacaccaggccatggaggcgcaacttccagtgctcgtaaaaacagatgggatgaaacccccaaaacagagagagatactcctgggcatggaagtggatgggctgagactcctcgaacagatcgaggtggagattctattggtgaaacaccgactcctggagccagtaaaagaaaatcacggtgggatgaaacaccagctagtcagatgggtggaagcactccagttctgacccctggaaagacaccaattggcacaccagccatgaacatggctacccctactccaggtcacataatgagtatgactcctgaacagcttcaggcttggcggtgggaaagagaaattgatgagagaaatcgcccactttctgatgaggaattagatgctatgttcccagaaggatataaggtacttcctcctccagctggttatgttcctattcgaactccagctcgaaagctgacagctactccaacacctttgggtggtatgactggtttccacatgcaaactgaagatcgaactatgaaaagtgttaatgaccagccatctggaaatcttccatttttaaaacctgatgatattcaatactttgataaactattggttgatgttgatgaatcaacacttagtccagaagagcaaaaagagagaaaaataatgaagttgcttttaaaaattaagaatggaacaccaccaatgagaaaggctgcattgcgtcagattactgataaagctcgtgaatttggagctggtcctttgtttaatcagattcttcctctgctgatgtctcctacacttgaggatcaagagcgtcatttacttgtgaaagttattgataggatactgtacaaacttgatgacttagttcgtccatatgtgcataagatcctcgtggtcattgaaccgctattgattgatgaagattactatgctagagtggaaggccgagagatcatttctaatttggcaaaggctgctggtctggctactatgatctctaccatgagacctgatatagataacatggatgagtatgtccgtaacacaacagctagagcttttgctgttgtagcctctgccctgggcattccttctttattgcccttcttaaaagctgtgtgcaaaagcaagaagtcctggcaagcgagacacactggtattaagattgtacaacagatagctattcttatgggctgtgccatcttgccacatcttagaagtttagttgaaatcattgaacatggtcttgtggatgagcagcagaaagttcggaccatcagtgctttggccattgctgccttggctgaagcagcaactccttatggtatcgaatcttttgattctgtgttaaagcctttatggaagggtatccgccaacacagaggaaagggtttggctgctttcttgaaggctattgggtatcttattcctcttatggatgcagaatatgccaactactatactagagaagtgatgttaatccttattcgagaattccagtctcctgatgaggaaatgaaaaaaattgtgctgaaggtggtaaaacagtgttgtgggacagatggtgtagaagcaaactacattaaaacagagattcttcctcccttttttaaacacttctggcagcacaggatggctttggatagaagaaattaccgacagttagttgatactactgtggagttggcaaacaaagtaggtgcagcagaaattatatccaggattgtggatgatctgaaagatgaagccgaacagtacagaaaaatggtgatggagacaattgagaaaattatgggcaatttgggagcagcagatattgatcataaacttgaagaacaactgattgatggtattctttatgctttccaagaacagactacagaggactcagtaatgttgaacggctttggcacagtggttaatgctcttggcaaacgagtcaaaccatacttgcctcagatctgtggtacagttttgtggcgtttaaataacaaatctgctaaagttaggcaacaggcagctgacttgatttctcgaactgctgttgtcatgaagacttgtcaagaggaaaaattgatgggacacttgggtgttgtattgtatgagtatttgggtgaagagtaccctgaagtattgggcagcattcttggagcactgaaggccattgtaaatgtcataggtatgcataagatgactccaccaattaaagatctgctgcctagactcacccccatcttaaagaacagacatgaaaaagtacaagagaattgtattgatcttgttggtcgtattgctgacaggggagctgaatatgtatctgcaagagagtggatgaggatttgctttgagcttttagagctcttaaaagcccacaaaaaggctattcgtagagccacagtcaacacatttggttatattgcaaaggccattggccctcatgatgtattggctacacttctgaacaacctcaaagttcaagaaaggcagaacagagtttgtaccactgtagcaatagctattgttgcagaaacatgttcaccctttacagtactccctgccttaatgaatgaatacagagttcctgaactgaatgttcaaaatggagtgttaaaatcgctttccttcttgtttgaatatattggtgaaatgggaaaagactacatttatgccgtaacaccgttacttgaagatgctttaatggatagagaccttgtacacagacagacggctagtgcagtggtacagcacatgtcacttggggtttatggatttggttgtgaagattcgctgaatcacttgttgaactatgtatggcccaatgtgtttgagacatctcctcatgtaattcaggcagttatgggagccctagagggcctgagagttgctattggaccatgtagaatgttgcaatattgtttacagggtctgtttcacccagcccggaaagtcagagatgtatattggaaaatttacaactccatctacattggttcccaggacgctctcatagcacattacccaagaatctacaacgatgataagaacacctatattcgttatgaacttgactatatcttataattttattgtttattttgtgtttaatgcacagctacttcacaccttaaacttgctttgatttggtgatgtaaacttttaaacattgcagatcagtgtagaactggtcatagaggaagagctagaaatccagtagcatgatttttaaataacctgtctttgtttttgatgttaaacagtaaatgccagtagtgaccaagaacacagtgattatatacactatactggagggatttcatttttaattcatctttatgaagatttagaactcattccttgtgtttaaagggaatgtttaattgagaaataaacatttgtgtacaaaatgctaaaaaaaccagacgaactgttagcaaaccaagcaacaccactcaacaaatataacccgtctacctcccttgaacatcatgctcacaagaagcccccccatcaaccctcacccacacacgccgtcccaaaccacgacccccccccgagcccggcccacacaccccccccccccgcgccccctccaccccccccccaacgcggcaagaccgcactccagcacaaactagcgaaccagcaaaaccacacccccccggcggcaccacaaacgcgccgaatcgaccgccacagccaacgcccctcagctcccgcacaccccatcgtgcgacagctcacacaccaacccacccccacgtccccacacgatgcgccacgcatacactttagacgatgatcactgaccgcgcacaacgcctccgcacgacccccaccactcatacacacccaccgcgcactaccccccacccacaccatcccaccacagaccccccagcgccaccccacccgcgcacacannnnnnnnnnnnnnnnnnnnnnnnnnn

SEQ ID NO: 21895 - DNA, 1330 bp, Homo sapiens
  misc_feature 1, 2, 1321, 1322, 1323, 1324, 1325, 1326, 1327, 1328, 1329,1330: n = A,T,C or G
nnagcgtccggtgaaaattcactggtgtttttcggcaagttattgatgagatactaaaaatgatgtttttgtctagtacaaatggtgtgatttttctaaagagcagttcaaaggaaatatgaaatgaaattgcatataagatgattatgcagcctactactatagaaaattataatattatttagaaatgcaaaaagtacttaacttacacttcaagaatatgactcataattgactcctctttgtcttccctctggtcatacttaagtttattcatagtaactgtacttatagataagaaaaatattcaaatttattttaggctaaaaagcataatttcaacaactaaaatgctatgctttattatgaattattgatttacttaatatattatttattatatttcaggtttgaagaaactgcagagttactgaaatgtccaaatcactacttgtaggattttctacatgaacttttttctaggactttggttactatacatattgtatattttaagaattctttatacaattttaatatactgcaatactgcagtttttgacaatttggattccatttggtatatgaagttttgcattcattattgaataactcttttaatatttttgagcaatgattatactgctttaccttgtgtcactttttttttttttaggaaaaactcatgttccagtatatttctcttacagagtgaagtcattacagcactgtatttctgtgttgacattggttggcagtgtgctaagtaatgttttttaaagcacaggcttgaggactatggtttacatcctgttggaaacattccaaatgggacttgtgtattatacccaggaggctctcatatataccatcttggcatctgtactgatgaataagttataatgaacagttaaaaatgctcattgaaaattaaataaaacaaaaaggcagttatttcatgcttggtcaaaaacatcaatacctttccaattaacactgagaaattaaggttaagattctccttttgtactgggaaacaggctggaggactatggtcctcaagtttagaccaagaggactatggtctcaaggttcaccatgagaaatgtgttgaacatttatagtatgctctatggtataattttttgggagggggggatggagtttcgctgttgttgcccaggctggagtgcaatagcccatcttggtcaccgcaacctctgcctacgggtcaagtaattcttgtgcctcaacctcctgagtagctgggatttataggcctgacaccatgccaagctaattttggattttattagaacannnnnnnnnn

SEQ ID NO: 21896 - DNA, 2322 bp, Homo sapiens
  misc_feature 1, 2322: n = A,T,C or G
ncgaccctggaaagagttcatgtcagatgctagaccagcaagttacccaactcaaaattcagccaatgattctttactatagagtacctatcatgtgtcaaataatatacagacttcactactaaccctcacaaaaacttgcagggtaggtggaatgagccccaatttaatttggaggtaatagtgggtcagaaagattaaatgacttgccttaagtcatagagttagcagtgagtggcagcactgggattcaaacccaggtttgtgtcttgtccaaagcctgtgcttactgctttaccattgtgctctttagtttgtaaagtatggtaagctggcctgttatttgtttagtatcttctggattttttttttttaattatagagctagcttaccgtgtgtatcatgtaaaaaaaattcataagattaacaatttccatgagaatatcataaactcagggcacacattctggccattcctgactaaaaaacttcaagcagaataagcagctataaaatagaaaagaaaaattaaggataaacggcattgtgaaaaaaaaccgagccacacagatgagaattaaaaattaacagccagcaaactcaaaagaacctttgtcctccttgagatatggtgatgatcaaaaagttagcaaggaatattaatcaaggaattaaagggcattaggaatgctatagtattggaagaaattacatcttaacatttcaaagccccatttcacttaagagtaaaatctaatctgatgttttttactctgaattttattcagtaatttttattcataattcatgataattggtaatgtagtataattgttagtaaatgcagtacaaattgttctactgttttaaaaagttttccgcagaacagtgcatttatggcaatgctatgtttaatgagttagggacatcaaatatatagtagttccttattttcagttgtgaaaatgaaatggctaaagcagaagagacgtctattttagtcttttaaaaatgtgtgtgggtggtcttttttcctcagaagcccaaagcacatgtatattttgttatttctccttgctatattcctgagactatactaaaaactttaagaaaaggaacaagaaaaaggtaaattcatgtgttccccactgctgtgtctagaaccaagatcacattatatcattgttaaaattgtgttatctagaaagtgcaatatagggaaaacactctaagaatcttttaaaagcctagtgtttcccttatttgtcagaatatgtggtagtggcatccataagtatcttttaacttgcatttagcaggacaaatagtgtgatacttatactgatgacaatcatccccatttaatgaccagcagtcactgagcgctgtgaaaattcactcagtgataccccgtgttggtcttgaaggaaaccgtacatatgaattttggatagctaatgtatatctctcaagtgccaacatttaaaacttgtaattatttttgatgtgagtatttcaggtatgttagtataccttcctgccttcttcttaaacatcatgctcagtataattcacattttcatgatgaaaagttaaagttatattcataatgtattattataagtatccagctctgatgtatgtaaaacacttcataaaatgtaaagggctataacaaatatgttataaagtgattctctcagccctgaggtatacagaatcatttgcctcagactgctgttggattttaaaatttttaaaatatctgctaagtaatttgctatgtcttctcccacactatcaatatgcctgcttctaacaggctccccactttcttctaatgtgctgttatgagctttggacatgagataaccgtgcctgttcagagtgtctacagtaagagctggacaaactctggggggacacagtctttgagacagctcttttggttgctttccacttttctgaaaggttccagtaaccttctagatatagaaactcccagttaaagcctaggctagcaatttttttagttgcaactaagtaagatatactacaaactaggatgctgctagactagggaataaacagcaggtaccaaagtacagcaagcaccaacaagggtctgttttgcgagagggctaccatgctttagaaacaggagagtccggggacacatccgtagacttgagtttcgggcccacctggcataccttaaatgggtgagttccgttgtgcaaaccgtgctcccctaagacttgatttctcagagcccgcgtgattctcgcagggatgaggacacctctctgtatctaaggcan

SEQ ID NO: 21897 - DNA, 689 bp, Homo sapiens
  misc_feature 687, 688, 689: n = A,T,C or G
acctatggaccataggcagtcttcagggaccagtgtctccaatttggatccctttctgtgtgtcaggggcatccaatcttttgcttccctgggctgcactggaagaagcattttcttgggccacacataaaatacactaacactaacaatagctgatgagcttaaaaaaaatcccaaaaaaactcataatgttttaagaaagtttacgaatttgtgttgggccgcattcaaagccatcctgggctgcatgcggcctgtgggctttgggttggacaagcttgcatgtgactgagtttgttcttaaactggtaaggaaactttgtcaggcagtatttatttccataagtggtgttttcctacgaatcagcacatggtgaaaaatgaggggctatgtatatttaaggtgcagaattaaattggtttaaatatcttttctattttgagctttgattttgataccttaaaggaaatatcaacagtactatttccaacctgaagcctcctcagctgttctgtcctagacttatggcgtcctctagtggccactatgggcagctatgatcctgttaccttccccagcagttcccttcctgccctgttccccactgctctggcttgggtcaagccaggcctgcctcccgccaacatattcttcagaattttacctcatgtaatagctgatgagcnnn

SEQ ID NO: 21898 - DNA, 615 bp, Homo sapiens
acttcagtgtcaatttcttatatacagggacttttatcttaatataatcatagtatcatgatcacacgcaaaaaaattgacaataattccttgatatcattatcttgattttcaaataattgtctcaaatatttctagagtttttttttttttacagtctttttacagttgttgttttcaggggggcccaaatatggttcaccatttgcatttatttgataagtctgttcagtcttctaatctatgacagttcccattccctcccactccttttggtaaaaatgccatttatttgttgaggaacttgaaccttctgttttataaaatgcctcacattctggatttggtcgattgcttctttttagtatctttaacttattagatctcaaactcagctgcacatcagaatgacctagaaagttttaaaagttattgatgtattaaaagtcccacccccagagagtgacccgcgtacttagcagggagtattggtttaacagctttgtctgccatagcaatcagcagaacgcctgttctcatgaacttcatgatgagaggctcttgggtgacaattggtgtgacctttgcagccatggttggagctggaatgctggt

SEQ ID NO: 21899 - DNA, 825 bp, Homo sapiens
  misc_feature 1, 2, 3, 4, 432, 534, 540, 547, 570, 571, 577, 721, 722,723, 724, 725, 726, 727, 728, 729, 730, 731, 732, 733, 734,735, 736, 737, 738, 739, 740, 741, 742, 743, 744, 745, 746,747, 748: n = A,T,C or G
nnnncttaggctccggcgtctgcaggggtcgccgagctaacccgtggctaggcgagtggggcggggcggccggcaccatgtcgaggcaggcgaaccgtggcaccgagagcaagaaaatgagctctgagctcttcaccctgacctatggtgccctggtcacccagctatgtaaggactatgaaaatgatgaagatgtgaataaacagctggacaaaatgggctttaacattggagtccggctgattgaagatttcttggctcggtcaaatgttgggaggtgccatgactttcgggaaactgcggatgtcattgccaaggtggcgttcaagatgtacttgggcatcactccaagcattactaattggagcccagctggtgatgaattctccctcattttggtttattccaatctctggtgtggcgtgttgcggngagctttggagatggtccagatggctgtggaggccaagttggccaggacaccctgaaaggagacgtgtgacagaaatccggatgagaatcatcaggcggatngaggancatcttncagctggagagggataccatccnntacacngaggatagccatcaggagcacttgtggaatcagcaggccctctgtgctccctctgcccctccagaactcagtgactcttgaacatggatgttatatattcttataacctgtttccattctccattcaaataaagagcagactgnnnnnnnnnnnnnnnnnnnnnnnnnnnngagatcctaagtatttttggaaagctatattgtgagttatagacacctgtcaatttctcagaaatggtcttatctgg

SEQ ID NO: 21900 - DNA, 774 bp, Homo sapiens
  misc_feature 1, 2, 746, 747, 748, 749, 750, 751, 752, 753, 754, 755, 756,757, 758, 759, 760, 761, 762, 763, 764, 765, 766, 767, 768,769, 770, 771, 772, 773, 774: n = A,T,C or G
nnactttattataccatacatactataggtacctgggcacaagataggtcagggggtactgtacccctatttacatgcttaatcacatcataaggttgcaggtggtacttgaaatcatcactaatgagacagcaaatatgttagacttgctggcccagcaagccacagaaataaggatcaccatctattagaatagactggcttcagactgcctcctagcccaaaaagaaggattatgtggaaagttgagcctgatgaattgctgcctagaaattaatgataacaggaaagccatcatagaaatagctgccaggatgtggaagatagctcatgtcccagttcagacctggaacccagatggtctccagattccctcttaggaggttggttttcatcctttggtggttttaaaacattaggggtagtgttggctatattaaaaggttgcttaatgttcccttgcctcttaggcctcctcatcagaaacatccaatcaatcacagaatccatcgttaacagaaccacctccactccactgatggctctaaacaagtatcaacccgtaccaaacagagaagaactgacttgtaatgaggaattaaatgatagtgatgccttctattgaattccatttacaggaggcatcaaaggggaagatgagatgggaaagaaagaaagaaagacagaaagaaagaaagaaagaaagaaagaaagaaagaaagaaagaaagaaagaaagaaagaaannnnnnnnnnnnnnnnnnnnnnnnnnnnn

SEQ ID NO: 21901 - DNA, 1942 bp, Homo sapiens
  misc_feature 1920, 1921, 1922, 1923, 1924, 1925, 1926, 1927, 1928, 1929,1930, 1931, 1932, 1933, 1934, 1935, 1936, 1937, 1938, 1939,1940, 1941, 1942: n = A,T,C or G
acgcggggggcgccactagagaagggcgagcggcgcggcagagtgcggcgcagcgcagctcctgaggttttggttatgaacaggattcggattcacgtcttgccaaccaatcgggggaggatcactccagtgcccaggtctcaggaacctctgtcttgtgcattcactcatcgtccatgctctcaccctcgtctggaggggcaggagttttgcattaagcatatccttgaagacaagaatgcacccttcaagcagtgtagttatatatcgacgaagaatggaaaaagatgtcccaatgctgccccaaagccagagaagaaagatggggtgtccttctgtgctgaacatgtccgtaggaatgccctggcacttcatgctcaaatgaagaagaccaacctagggcctgtgggtgaaacactcctgtgccagctgagctcatatgctaagacagagctggggtctcagactccagaaagtagtcgcagtgaagccagccgaatactagacatgctggtgtctacacagcagaagaagtggccctgattatgcgtgaaaagctaattcgtttgcagtcgttgtatattgatcagtttaaacgacttcagcatctgctcaaggagaagaagcgccgatacttacataatcgcaaagtggaacatgaagctctaggcagtagtctcctgactggcccagagggacttttggccaaagaacgagagaacttaaagcgattaaaatgtctgcgacgataccgccagcgctatggagtggaagccttactgcataggcagttgaaggaacggagaatgctggccacagatggtgctgcccaacaggcccataccactcgttccagtcagaggtgcttggcctttgtggatgatgttcgttgttccaatcagtctcttccaatgaccagacactgccttacccagaaagatgcgactgccattggtgacctgttaactctttactgtggtctaatggagacagcactcgactgaaagtgaaggacccagactctagttgacttggatgttgtgggtgatggtatgcagtgtcctccttcacctttgctttttgatccttcactaacccttgaagatcatttagtcaaagaaattgctgaagacacagtggatattttgggccagatgcagatggctggagatgggtgcagatcccagggatctcgaaattctgagaaagcctctgcaccattgtctcagagtggattggctactgcaaatgggaagccagaacccacttctattagttgatagtttggggaaccattttactttggtggatttaaatttctcgttcttcaaagaagtatttctgatcatctctcacaaaacacaggcaacccagactaccttgtttttcttctggattgagtattatagtcaaacgtaaagccaaattttgaggacgtggaccgtgggtttcttcccactcagggcaaggaagagaaagagagataatccctatcaaagcttctgggatcatttgggactatacctaaaaggaaagtgacatctttgtaatgggatttcccaagtcatggatagaaatccacttaagtagctaggtgggagctgtctttgtgagtggtgtctttgagatactgatggccctaatatcggttatctctatctgaagacctgcagtttagcttttcttcacctctacttaattgggcagtctttaacccctttccctggtgaactctggctttttatcctctgagaaaacagcccacaggactgggtcctccttatccgtcttgcttttaacctatgtaaatttctgtggttgctatcttatgtaaaatatagtaaaaatttattgtatatagtttctattaaatgttaaagaaaatgttatgaaaatatcaaacagtcacctgaattgaannnnnnnnnnnnnnnnnnnnnnn

SEQ ID NO: 21902 - DNA, 423 bp, Homo sapiens
  misc_feature 411, 412, 413, 414, 415, 416, 417, 418, 419, 420, 421, 422,423: n = A,T,C or G
acgcgggggacttggccctgggggacaacaagtggcaggaacaggatcctttaaaacagtgtcaaacttctcatgcatggagcatgaattcttactaatagagactgtagtttttttcttgtctttggtaaatataataaaagaccttaatttttcttttttaatgaatggagaaaacatgagaaaaccagatggacctgttagaactgtagtcctccttcatttttggataatgaatcctccacatttaagggatattagatcattcctaccaataaaaaactatttatttaaaaatgaaaactaagcctttgtgtgaatttaaaagtattgtctagtgtgaaaactgatgaaaaataaaatctgaaaagtcaactgcttatatctaccttctttattatgatctggccnnnnnnnnnnnnn

SEQ ID NO: 21903 - DNA, 1700 bp, Homo sapiens
  misc_feature 1, 2, 3, 4, 5, 6, 7, 8, 9, 10, 68, 69: n = A,T,C or G
nnnnnnnnnnccggtttcagggaaagttttgaaatttttttttttaaaaaaattaaagggcccccccnntttttttttttttttttccccgccacctccttatctttctctagaatgttatttattaaaaatagattctctatccttcccctcacccctgcgagcaaagtggcctttcccaacatcttttcccaaatggatgaaacaggtcttgaggacgcagatgtggcattctacataaactacaggatcaggcttttctgggacagtgggtctgctggagccaagagtggaacagcacaagacaacatcagcaaaccctggcgcacctaaccgcgggctgccatggatgccgggacggactggagttcctcctgctccaggtacaagtccacaaagagagacccagcggcccagcagcagcctcctgggcaccaccagaaagcgatgtacttaagggcctcaggcggtcgagaggcaacgtggcttccacatgtgtgggaatgagactaaaaagctggctcaaagcaaaatatgaacttataggaaaggagggccctggactgggcaggaagagagagactcgtggcaattctagagatggcagtgcccagccatcaagttctaaagagacccatttgggagtgactctgcctttagccaggttgagctcacagacacacaggcccagaggccgaattcgcggccagcttccaggtgtgccggggcctctcgttgcttttaacagtccagccagagagggttcagttagtgagagtatcttcccatgatcaaacacagatgcccgagtttctcttcactatttcttccgcttcagtttcatatcttttttgttctttgtctctctgttcttcaacttcttgctctgtttgggttcttgtttggcctctaacttccttttcttgtcacttttcaggctgatgatcgaggcgttcggcccagctttgttcaaaacttcattccactcttcatcgtccccacggattatgtattcagagaggtccatgctcttcagcttccctacttccttcttgtgtttctcctgaaattcctttgctgcttcatctaggtcgtcactgagggtcttcatcgtgggctccatgaccacatccttcgctgccaccatctgctcctcaatggccttttcctgaacttcattaaatagcttcacaactttgcggatgatccggttgaaaagtcccatcaactggcccgagggcagctcaatctccttttccagctggtccacagacttatgctgcaggccaatccccaagagaagagccgactgagccgcagacagggccaggtcccccagctggttcaggaaatagatgcgagagatggccgggatcatgtccatgatgaggtgatagtccaccatattccgtgaatacatctccagccgcttcaggtcataggggaggaagagtgcttccagctcctcccggctcagggcaggctgggctggcttccccatgttcctgttctgaatgatgttcagagccagggaaggagagaaggtacctgcccgggcggccgctcgactacataaaatacaaaaccttagatgggcatggtgctgtgtgcctatagtcccactacttgtggggctaaggcaggaggatcacttgagccccggaggtaaaggctacagtgagccaagagtgcactactgt

SEQ ID NO: 21904 - DNA, 1319 bp, Homo sapiens
  misc_feature 1, 2, 3, 4, 16, 1318, 1319: n = A,T,C or G
nnnncgcggccgcgtncgacagaagacgacagaagggtacggctgcgagaagacgacagaagggtacggctgcaggtacgcggggaggtctcgcgtctgccaggagctacggccggaagatggcggcggccgcagagttgtcgctactggagaagtccctgggactgagtaaggggaataaatacagtgctcagggcgagcgacagattccagttcttcagacaaacaatggtccaagtctaacaggattgactactatagcagctcatctagtcaagcaagccaacaaagaatatttgctggggagtactgcagaagaaaaagcaatcgttcagcagtggttagaatacagggtcactcaagtagatgggcactccagtaaaaatgacatccacacactgttgaaggatcttaattcatatcttgaagataaagtctaccttacagggtataactttacattagcagatatactattgtactatggacttcatcgctttatagttgacctgacagttcaagaaaaggagaaatatcttaatgtgtctcgctggttttgtcacattcagcattatccaggcatcaggcaacatctgtctagtgttgtcttcatcaagaacagactatatactaattcccactagaagctgtccatgccatacagaagatctattaaaaatgttttaaatggaaaatgtactctagaccacaggactaatgtaaattaatatacagtcattcattatttgttgaagttgatagaatttttgaagtgtaaacttgtgtctgaatgttttatttgttctttagctgaagttttgcaatttttatgtcaaaattcaattgctattaaacaagttgagatccagttataaattaaccttgtttttagtagatgacatttatttcaataaaagttgcaaatcgggcttaatcttaaaaaaaaaaaaaaaaaaaaaaaaaaaaaaaaaaaaaaaaaaacaaaaaaaaaaaaaaaaaagaaaaaaaaaaaaaggggggggggggtaaaaaatttccccggggggggccaaagttaatgacgtgacacccggttttgtggtgtaaaaggggcgccaaaatagagggggagtaatataagagagagagcagacggggcggtgttataaacagttgttgtgtggtggagaaacttgtgtgtgggatattattgggaaaagacccccttcttgtggggtgaattgtggacacacctagagagaatttaagccaggaaattaacttagggtgtatggtggtaacgcgatattgtggaaaatttgtcagattgttgaaatann

SEQ ID NO: 21905 - DNA, 1077 bp, Homo sapiens
actatagggagtcgacccacgcgtccggctaaacgcaatgtcatttttaaaaagaaggacttagggtgtcgttttcacatatgacaatgttgcatttatgatgcagtttcaagtaccaaaacgttgaattgatgatgcagttttcatatatcgagatgttcgctcgtgcagtactgttggttaaatgacaatttatgtggattttgcatgtaatacacagtgagacacagtaattttatctaaattacagtgcagtttagttaatctattaatactgactcagtgtctgcctttaaatataaatgatatgttgaaaacttaaggaagcaaatgctacatatatgcaatataaaatagtaatgtgatgctgatgctgttaaccaaagggcagaataaataagcaaaatgccaaaaggggtcttaattgaaatgaaaatttaattttgtttttaaaatattgtttatctttatttattttgtggtaatatagtaagtttttttagaagacaattttcataacttgataaattatagttttgtttgttagaaaagttgctcttaaaagatgtaaatagatgacaaacgatgtaaataattttgtaagaggcttcaaaatgtttatacgtggaaacacacctacatgaaaagcagaaatcggttgctgttttgcttctttttccctcttatttttgtattgtggtcatttcctatgcaaataatggagcaaacagctgtatagttgtagaattttttgagagaatgagatgtttatatattaacgacaattttttttttggaaaataaaaagtgctaaaagaaaaacacaaaacaaaaaaaaaaaaattttgttggggggcgcttcgggccctcaaaaaaaggtcttcaagaccattccggctgtgggcgcgcggggcccatgtgggtatgtgaccacttggcaaaagggtggcacagggaaaccccgcgcaacaataggggggggcgtcccccaaaaaaaaacgcgcgggggcaccgggggtttgaacgaccccaagggggccgaggcattaggggccactaacggggccagagcgaatc

SEQ ID NO: 21906 - DNA, 1097 bp, Homo sapiens
  misc_feature 1, 2, 3, 4, 5, 6, 7, 8, 9, 10, 11, 12, 1097: n = A,T,C or G
nnnnnnnnnnnnccgaaatactctcgaagtcaatgtaaacgacacaggggagagcggttgcgcagtgaaggctagacccggtttactggaattgctctggcgatcgaggggtcctagtacaccgcaatcatgtctattatgtcctataacggaggggccgtcatggccatgaaggggaagaactgtgtggccatcgctgcagacaggcgcttcgggatccaggcccagatggtgaccacggacttccagaagatctttcccatgggtgaccggctgtacatcggtctggccgggctcgccactgacgtccagacagttgcccagcgcctcaagttccggctgaacctgtatgagttgaaggaaggtcggcagatcaaaccttataccctcatgagcatggtggccaacctcttgtatgagaaacggtttggcccttactacactgagccagtcattgccgggttggacccgaagacctttaagcccttcatttgctctctagacctcatcggctgccccatggtgactgatgactttgtggtcagtggcacctgcgccgaacaaatgtacggaatgtgtgagtccctctgggagcccaacatggatccggatcacctgtttgaaaccatctcccaagccatgctgaatgctgtggaccgggatgcagtgtcaggcatgggagtcattgtccacatcatcgagaaggacaaaatcaccaccaggacactgaaggcccgaatggactaaccctgttcccagagcccacttttttttctttttttgaaataaaatagcctgtctttcaaaaaaaaacaaaacacaacaatacaaataacaacaaaacaatcgggagctttggggggggacaaagagtaaacagcgcgacggacaactgcgcacaacccacgctcttgaaaagggagacacggagcgcaaagaagagggaaacaaaccacgtgcaacgcaaggcagaacagccagctcacacgcgcacacgagcgcagaccgagcacgcaagaaatgtacggatagtgagacaagaacaacagagcaaacacaacacgacataggacaagcagagaggcgagagacgcgcn

SEQ ID NO: 21907 - DNA, 867 bp, Homo sapiens
agtcagggagaggcgggatcacggcccaggctgctgacacccgcgcgtggggaggactcgggccacgaaaggaaagaaatgtataccgtatctatctacccgacagcagcgaccgagacccggtgggacactccccttctccccactttcacctccccacccaaactttataaaagttgaaaaaatatcatttgactttttatagaaaaaaaaaggaaaaaataattgagaaagtgttcatctgaggactgcatcggtggacactggtatttatttatgttagctccaagcggaccggtggttcaaaagtgcattatttagtttgagctctgtaggtaaaaaggaggtgggaaaaattttaaaacttgagggtaaaaatgtggaaaacaaaccctcccatcccttgtagattataaataaaagcaaaaccgccacagaactagaggtcttctctttaatgttactttaaaattgctatgattgtattgtacgttatttaatgtctgattgaaacacaaatttacatgcatgtttgttacaaaaaaaatgaaaaaaaaagtcacaattttgtcagctctgatttcaaattgcaattatttttaaggtgtataccatcgaagagaatgggtatttttttgtatgtattctggaagaaaacaacaaaaaaaaaaagaaaaagaaaaaattctattccaaaacctcatttgccttattttgttctttaaaaggaacacttaactatttttaatttttaagtccacccgctgagaaggggacaaggtttacgtcatgtactaaaataatagacaatgtatcgctttaaagattaaaattccgtatatttgatgtattaaaaaaaaaaaaaaa

SEQ ID NO: 21908 - DNA, 1105 bp, Homo sapiens
  misc_feature 1, 2, 3, 4, 5, 1103, 1104, 1105: n = A,T,C or G
nnnnnccatgaaacctgtcttccaccacaacaaccctgggagagaaaaacatgctaaaggaggtatcttggcttaataattccttatagccaatatcaacagtggcaatcagcacacagaggaaaggacccaaatcactatgtagcttaaagatttctgttaatttgaaagaacaaaaacaagacagaacttctggtactctaatcaggatgattcctaacaagtcagtcatttgtgaacttagtggactttttggttactttaatttgcatatattctccagttacatcggactctatctgtggccttgttcttcatttcagtgttaatcagctaaacagaagttgttgcttatgatgtgtgagtgaacatatgccactgcctggcctttttttcttcagagcttgttgtctttttcgctatattagactttgcagtatgcccagaagctttccttcataaaatagaaagaaaaaaacatttggcttatttttcactgtagctagtcttttatacaataatcttgtaagaaaatttcttgaattctaaatattactctttctagatttttgaaatcaaaaagttttcagtaaaaagtttcttactttattttattatattaggtagtaaaaaatgtagggttatttaccataacctgttcattaatatcagaaatttacaatagcattttaagaccatagtaggattctagcataccgtgtagtacctatggagtattgtaagagctaattgttggagatgaattgcttctcatcttgttctccagtttccattgttggtttattgcagatttgtatcctgtgtcaaattcaaggtattattgataaaccttttcaaccagcagcaagaagttcaaatttttttctgtcactgtaacagaaaacacaatatgtatataacatttatgtagcaataaatgtgccatcttttttttaacacagtaaacaaacatagaaacaaaaaaaaaaagggggggcgcaatatccggggagacatcagaccatttcaaggccctaatagcataataaacggggtaccaggaaagcatcgttgaggcactgtgggtgaacccacagaatagnnn

SEQ ID NO: 21909 - DNA, 1570 bp, Homo sapiens
  misc_feature 1, 2, 3, 4, 1569, 1570: n = A,T,C or G
nnnnacattttcccccattctccatcttcccttccctcttttccgtctttttatagcccccatcctgtgccttcccatatgtggccccatttgtgactttaagtctcaatctcccctttcggctgattccaaaaattccggcttgcaaactattcaaataccagttacagtcacccaactctccgtccaccagataattccctttttcccaatttagtgttcgtgacagaagataaactttgctatttcctttggcgaatcatccaggatacccttggacataaagtagttcactccctcatctgggttggcattaaaggtgaggctgccttcatccagctgcatatacaattttctaaaagaaaatcctaaaggtgggttcttattgtatatggaacagtgaccccaagtggatttgcacaacccttgccagagaagttcatcattcgcaaggtcctgccaaacacatgaagccaagcaaaggtcagttgcattcaggtaggacaagatggtaaagcttagctcaggaggcaacatttccaaattaatgaatccttcctgttctttcgatttccttgccttcaaaagatgatatatgtcaatgcctccttggacttgtttacgatgattggtgttagaaatgttgctcgcagccattctcctgctctgctctctggtgaggtagccttgctcactgtagccttcttgttgcagctgctggtttctgaccactctccacaacccttgacccatctgcaagcctgagcgacctgcgatctccaccgccgccgcgacgaattggcctctgggcggggacttttagccaaaaggaaaatggctcagccgggaactggtgcccaggccatggagaagctgattcaaactttacttgtccacaccggtagaggtgaccgcgatgagaataccagaaacagcactacgaccctcagaactcagggtacctccagctgcaggggccagaactgccgactatcccaattttgacgtttcctattgttgccggaagtgacgttaggctccgactcttaacggagacgcatgtttatttctgttgtctacgattcgctatagattccttgtttctcacttcgcagcacgagccactctgaccatcaagatcagaaaaacttctcagctgcaagttagaagtggactggccattgaggaggctctcagcggagtcgctcttcacaggagtcttgaacgcggtgtggaatcggcagcgaggaatcctggagcacagagaagctcccagctttgaaggtcttgcggtggtgcgtggcgggcaggaacccacaattccaaatacaaacggtcggcgcgagaagcgcttctgggcgcaggcgcctggctgtagcgactggttgcgggaggctggactctggtgactgtgtatggttgcatatgccccgttttcctctccctgtcgtgctgggcctttgaaaccggcttctttgctggtggctgcttggtgagccccgaggagacggccaagactgcgcctggtattgggcggaggtcgcctctctccgccgtccttacagagann

SEQ ID NO: 21910 - DNA, 2538 bp, Homo sapiens
  misc_feature 1, 2, 3, 4, 5, 6, 7, 8, 9, 10, 11, 12, 13, 14, 15, 16, 17,18, 19, 20, 21, 22, 23, 24, 2537, 2538: n = A,T,C or G
nnnnnnnnnnnnnnnnnnnnnnnncagcttcatttccatttttggagtgtgagagttttttattcaatttgtgaaggacagttttagaacaaaatgttagtaacactcttagaacactggtttgttcatttgacattttatctgcaccaatttttattacaaaaatcaaaaaagtaaaaattcattacaatatttgcagagtataaccactagttgcctagacaaaagctaatttctacaaaatcaaaaacttaatgcagttttattaagagagtcaaaattctctcagttaactggatatacatagtggtatatatcttaaagcagaaaaccccaaaaaacaaaaacaaggaaaaaagaaaatacatgtcaacagtcagttaaatattttgacctgacagtttctacaaatagtgattttcactacatataaaggaatctgttacatgtggtaaaacttccagagaccaagtaggaagtgtggaataaaaacaataaatccaaacgcagccccaggctgggcctgttttccatgaagcccaaggcagtgatcttcatcattaaggagggaccactgtgtccacaactaaaaccttcaaccacatggtgatctgcaaagcttcattgaaaaagacaaacattctcttcttcacacaaatcactgcagaaatctttgtaaggctgtaccttgcatagggaaatagctgtgttccgtcaaattctacagaaaagagtggaagcaagctttttaaaatgatgcccatgtgcaaagagataaattaccaggcacctgatttaccaccccaatttatcttgatcatataatcttttaacaaaaagaaaaatggcaatatctggtgacagtattaaaaagacaatgttgagattggcatcagaaaaactccaaaagtgcaccttataaaaaggacacctcactgtagaaacatctatgcacttagtaagccctactcatgcacaaacaagcagttgctgggaacttgtcgaagtttactttttcagaaagttgaagtatataaaaaaagtacaagttgtgacattcgttcaagttgctgctacatgggtattctgagctggctaccaggaaggactcctgcgtttccgagagccaggtcagcgtctctaggagccgtggtgcaggtgcatggtgcccagcacggcactgtcgtaccgctcctgcaccttcacggacttggaatgctcgaccacactgttcagttctgggatgctttcagcagtgtccccaaacccgtggtagtgtccatagtacaggttatccccaatgtcttccacccaggaaggcctactggctatgcagctacttggactcccgttcaggtgcagagaaccgcacaactcagggttagctctcagggtcttctctggctcctcagtcccactaatgcagagagaaccctggctactcggaaacggctgtcctggggctaatccactgctaattccgttagttcctgtcaagcactggccattcctgctttccatcccactgagcggggtcgtggaggggaagtccaaatgtccattgatgacacatccatttgtcaatgtattcgatacggagctactgtttttcatatctgttacaacagcaaactccctatcaacgtgcattttgtcagcatcgtcttctgtgtcgccattcgtgagtggcacggcagaatccaagctttgagcttcagttctagctttctttactccaaagtcttctgagtcttccaagcatctctttcgatttgttcccacactaatatgattaggaaatacattctgatgacccccatttaagatgccattgttatagaaatggttcagatgacaattctggaggttcaagagaaactgggcacactcttggaaaccctgggtttgtgcaatgtctgctgctgtcaggccactggcatttctcaggtcgacgtgagccccattcgccacaagggcactgatgcattctaggctcccagagcgagctgccttgtgaatgggagtttcaccctcacaatccggtttgttaatgttggctcctgcttgaatcagccagaccaggcactgaggatgtcccccaaaggctgcaatgtgggctggcgtctgcgcgtaccgtgtggtggagacgttgagtgtggctcccgctctcaccaactgcactaagcactccaacttgccgaaatgcgcggcccagtgcacgggcgtccagccatagaaggagtcctcagaggccaggtgggcgtggggtgtctgctgcagcagcgagcagagcgtggccaggtccccgtcgcggcaggcgcggtgcagcgggaaacggagcgagagcagctcctcgctggagaagcccgcctctacgcccgcgcccgctcccgccgccgacatggtccgtcaccggagagcgcggggctcgctggcctagaggacgcgtcggggaggactcgagaagccgccgccgcagcacaaaggaacgagactagcgccgcggtcgcgtcccacaggctgccgagcggagcgcnn

SEQ ID NO: 21911 - DNA, 504 bp, Homo sapiens
  misc_feature 499, 500, 501, 502, 503, 504: n = A,T,C or G
accttggagatttcagccagccctgtagcatagataccagctaattaaatggctctcagttaaatggcaaatggttattgagcaaaaggtgttatggtaaatactagacattcaaagacaatcaagacagtctgatctccccaaaagcgtgctgtctactagaggagaaagatgtgtaccaagtcattatttctgacagcattgtgtattagaaggaacactggatttaatcaaaagataggagtttgaatcccgatgccacctcttaccaactgggtaaccttggataggaattgcataacttctctgagcctgttctcaaattgcctccctcataaggttgctgtgaagaataaatgcatgatggtttctgaagcacttatcccctgccgttagatctcctgagctgcatttctgtttaacacggcccccagtttgtcagccaagcagctcaaatatatgaagtctaaaatgaaagtaatgaccctttatgatctcnnnnnn

SEQ ID NO: 21912 - DNA, 302 bp, Homo sapiens
acaatatttatgcagggatacacaaatacatcagtgctacaaaccatagaaccagaaagactcacgtgtattagaaaacttgatatatgctggaggaggcattgcaagtcagtgtacgcggggtggtaggtagaaatataagatgactcccaagatttttgcaccctggcatacacatatgcttttccagttgttgaaacactaatttaggtgctgctgtgaagggattttgtagatgtgaataatgttccaaatcagttggccttaagatagaaagatgatcctggatgggccagatctta

SEQ ID NO: 21913 - DNA, 536 bp, Homo sapiens
  misc_feature 535, 536: n = A,T,C or G
actgaagagtaggggtcagaaagaggactgggggatttcccctaattattctcactaatccttattgcttttttattgcaaaaaggaaagaatattgttatgcatactcaaattgttttttttcccctgttaaaccatgattatacatagattttgtctccctctctcgtgggtattagaaccctgcatggttttctctgtgtggtggggccatagctttcttctaggatagttattaaaatgcataccactttcaattgtgtatccggcattctttccgtgatgttcagtgcctcgctagtcattttcatttaaagagacccaaatacttccatagaacagtacatagaaattcctgggtcaataattaagttgtaactaatagctcatagtcagacatcatgttattacaggtaagattatcttccacctgtatcgtttttcacagacctacagacatgaacgtatttgtattttcctgcccccccctcaaaattttatgaaatttatttcatttgagtcctttatgtctggnn

SEQ ID NO: 21914 - DNA, 1498 bp, Homo sapiens
  misc_feature 1496, 1497, 1498: n = A,T,C or G
agctgagacctgcaggacacaggaactcctcccagggtcctggatccagctgctgctcacggcaggaggcccgaaaccagaaagcctgagcacttgccccgtccccaagagatgcacagaggctggaaggggcagtgcaggggctgaccaacctgctcatgaaaggagggtccagctgggcttcctgggtcgagtaggggttcagaaagctgtgaaacactcatttcctgcatcaggacttacttcggtcctggatgaagagtactgaagatacatgcctaaaatattcctaacaccaggatttgtgcatgtgtttccttccccaagatagctataaacagcaaaaattctgctgtaagcttccctgtgtcctctctccctctcttccttccccctcccctaaaactaaaaggaatgttaaaagaccctttttctgtgaccagcggaccttatctatgctcccaattccaattccttgtgaacatactttgtaaagtcctgtaaaatcctgtctcttttgccatgctgctgcaaggtcataaagtagataaaattagataaaacctaagttgcaattctgtttttcctcaaaatctaagacatgtcacaaaataatttactgcctttgtttctctctctggtaacatcttcccaccacatgtatttcccgccttaaagagattaaaaggcaatcacccaaaaccaacagtggctaccctctccggaccccttccatgctgtgtaagctttgtactgtcactctgctcaataaagcctgcagctttttctcactctcagtccatgtctctttcactcactgtggtcagcttccacaccatttctttggtgtggcttggcaagaacctcaggtgttacatcttggcgagccagacaggagactccagaaaaggatcaaagccatcaagctacaaatgatcttacaaatggaacctcaaatgagctcagctcacggcttctaccgaggacccctggatcaacccgctggtccctcaattaccctagaaaattcccctctggaggacaccaaactgcagggccccttcttcacccctaaccagcaggaagtagccagaacgactgccacacggttcccaacagcagttggggtgtcctgtttagaggcaggactgagaggaggtgccagctgggcttcctgggtcaagtaggggctcagaaagctgtgaaactcactcatttcctgcatcaggacttacttcagtcctggatgaataatattgaagatatacgcttaaaatattcctaacaccaggattcgtgcatgtgttttcttccccaagaaagctataaacagtgaaaaatttgctgtaagtttccctgtatcttctctccctctctcccttcccccgcccctgaaactaaaataaaggaatgttaactgctcaaaaaacaatgaccagtggacctttctacacttcccattcagatcctgtcacatattgtaagccgtaaaccgnnn

SEQ ID NO: 21915 - DNA, 408 bp, Homo sapiens
  misc_feature 87, 88, 89, 90, 91, 92, 93, 94, 95, 96, 97, 98, 99, 100,101, 102, 103, 104, 105, 106, 107, 108, 109, 110, 111, 112,113, 114, 115, 116, 117, 118, 119, 120, 121, 122, 123, 124,125, 126, 127: n = A,T,C or G
acacggtattccttaggtcccttccattggtagtgatgctgcgagttattactggagaaaaggaattctagagcttaacttggcagnnnnnnnnnnnnnnnnnnnnnnnnnnnnnnnnnnnnnnnnngggttgtttgtttttggtgtaaaaggggaatgttgtgaaagagaacagttggaaaacccaaaaatatacaaatccacaaatacttagtttatgtctataaacaaagaaaaagccttttacttatcttcagaaatgaaagtataagcacaaagacaattgatcaaattattaattggggtcttctactggagactatgacccatgtcattttagttatacataaagaaaaataatggtgtaggtgatacctaatgttatccatgtatccgtgaagaaaaagt

SEQ ID NO: 21916 - DNA, 853 bp, Homo sapiens
  misc_feature 769, 771, 772, 773, 849, 850, 851, 852, 853: n = A,T,C or G
actaacctctggaacttttattgttttttattcctttgctgtatttcaggggtcatcgaatatcttcactgtctctgtaacatatacattttcaagccagaaaactgactccattagctaaattaaactgtttgcgaaagcctttttccactgccatgtcttatttctatttcagtttctctggtgggatatgttggtcacagtggatttccttttcttgctctggagttaatagatgatttgtgctgcactgttagtatatccaatgccattgttatgctgttacagaattatagtagaagatgcagtggattggcgcccccatgacaaaatagtccttagctcctcttcttatgagcctcatgaagcagaggtcctcactgtgaaagaagtccaagggccaccatgtgaggatctatgaccggctcaacccccggcatattggtaaggctttggtttgttggttaaggtaagtgaatgagctaggaagaccatgtttggtaacctagctggggacctcggatctgattgccattcagaggggaagaacaatgccttcctgttgacctagactcatgctacgtggccttatctctattccctcattaattttgttgctttatttttaaagaatacttggatgttatacacatacacacatacacatgcacacacattttgctttttatttataatggcaaatctaagagcagaagggttgagagtctttgagtttccagtttatttcctgacacattgaattataatncnnncaaatattgtagttactgtaaataatgatttcattttccatacttagaaatgtgtccttcctgacatgaagtacannnnn

SEQ ID NO: 21917 - DNA, 1140 bp, Homo sapiens
tggtacccacccgggtggaaaacgagggcaaatccgcggccgcgttttttctttattttaatttaatctagatacaggtactttatttacaaatatttagattaatagcattttgttacatcaaatgaagagtacagcagtctgaataaatccttcagtcacaaaaacaataaaacccactgtaactaactttgggagtcagggtattgcacctcaacaagccgcagtctttagtttgtgattgctaccttatatcccaatgggtggtttgtttgttttgtttttgtaaatatacacacacaccagcaggtcatggtccctgggtgagtcccttgtgatgcaacagtgtaagcaaaatggatcactgtaagtctttaacagaatataccaatctactccagaaatcttattttttaaaaagttaaacaaagacaaaaataaaaatgaatccacaaattaaccaaagcctactttctgcacattccagttttggcttttatttaacattgactatacaatactctggtactaccacatgtttacaacccagaaagatgtacttttatgttagtgtctgtaaagagggatttaaaatgtgtattttaaacacagcagttgagctgagtgcattttctatagtacgctgaggtgttacctattctatttcaaataaattctcaattcccagccactgaatcataaatgcaataaaaaaaatcaacagaaatgaagaacttaataaaacatgttgtccaaaaaaataagattgtttctcttgctatacagtattaattcagtggccaaaccacctggtgcaaagtaataacttactttgtatcagcacaagcgctgaaacacctttagaaacactttcccttttacaaaacaatttatgccaacatgacataaaacagcccctcacactgtgaacacagggatatcttaagttatttcactgtagggttaaaaatgcacaatttaaaatcccttaacagcagacctgtggttctgactgtccagttcagaatctgaccattccaagaagataagggtataaaagcttaaaatgggccatagtaacccagccttttttctttttctatacagtaaggcacagaatgcagcctgtaatgccaaaac

SEQ ID NO: 21918 - DNA, 567 bp, Homo sapiens
  misc_feature 564, 565, 566, 567: n = A,T,C or G
accgaacctgtaataatataaaggaaatgggggatgactcctgagtgcagggtttcctttaggggtgatgaaaatggcctgaaattgatggtggcgcacaacagtgggtggttgcataactctgtgaatatactaaaaaccacggaactgtgcacttttaattggtgaaatgtgtggtatgtgaattctatctcataaggctaatattaaaaagaatcatataaaacatttgctttgctatgatggccagtatgccatccctccaagtagctctgacattcattcatttattcatccattcattcattctacagatatttcttgatagtccactatatatgtggctctgtgctaagcactgggatacagagttgaagaagatagacattgtccccatcctcatgctattgggaacatagactttagataaaaaattgcactgaggtgtgatgaattttttattatggaaagttaaaaggagacaaggaacatacagcagagggtcctatcacagtctttggtcagagaaggttccaactctgatctagggagtggagggaggannnn

SEQ ID NO: 21919 - DNA, 315 bp, Homo sapiens
  misc_feature 314, 315: n = A,T,C or G
actaactttcactccccctctctgtaataaatgccttaagcaatttaaataagcagaatgtctaatttcattctgtcccattgttaccctggttcttctgagtgcccagcttacccgccgagcttctttcagtcgtcctcggtgtcctctgacaatgcatcttctgcttccacatgctctagcattccttcaccggggtcttcatagccccatgttgggcgccagaaatgttggggtgatcagacccaacaccaggccgtgggggctacgaagtccggaggagtctaaggaatgagaaaagacaagttaagagnn

SEQ ID NO: 21920 - DNA, 3614 bp, Homo sapiens
  misc_feature 1, 2, 3, 4, 5, 3614: n = A,T,C or G
nnnnnatggcgattgggcggctgcagagaccaggactcagttcccctgccctagtctgagcctagtgggtgggactcagctcagagtcagttttcagaagcaggtttcagttgcagagttttcctacacttttcctgcgctagagcagcgagcagcctggaacagacccaggcggaggacacctgtgggggagggagcgcctggaggagcttagagaccccagccgggcgtgatctcaccatgtgcggatttgcgaggcgcgccctggagctgctagagatccggaagcacagccccgaggtgtgcgaagccaccaagactgcggctcttggagaaagcgtgagcagggggccaccgcggtctccggcctgtctgcaccctgtcgcctgagctgcctgacagtgacaatgacatcccagttaccagtgtccttgaattgatagtggcttctgtttgtcagtctcatataagaactacagctcatcaggaggagatcgcagcagggtaagagacaccaacaccatgttctgcacgaagctcaaggatctcaagatcacaggagagtgtcctttctccttactggcaccaggtcaagttcctaacgagtcttcagaggaggcagcaggaagctcagagagctgcaaagcaaccgtgcccatctgtcaagacattcctgagaagaacatacaagaaagtcttcctcaaagaaaaaccagtcggagccgagtctatcttcacactttggcagagagtatttgcaaactgattttcccagagtttgaacggctgaatgttgcacttcagagaacattggcaaagcacaaaataaaagaaagcaggaaatctttggaaagagaagactttgaaaaaacaattgcagagcaagcagttgcagcaggagttccagtggaggttatcaaagaatctcttggtgaagaggtttttaaaatatgttacgaggaagatgaaaacatccttggggtggttggaggcacccttaaagattttttaaacagcttcagtacccttctgaaacagagcagccattgccaagaagcaggaaaaaggggcaggcttgaggacgcctccattctatgcctggataaggaggatgattttctacatgtttactacttcttccctaagagaaccacctccctgattcttcccggcatcataaaggcagctgctcacgtattatatgaaacggaagtggaagtgtcgttaatgcctccctgcttccataatgattgcagcgagtttgtgaatcagccctacttgttgtactccgttcacatgaaaagcaccaagccatccctgtcccccagcaaaccccagtcctcgctggtgattcccacatcgctattctgcaagacatttccattccatttcatgtttgacaaagatatgacaattctgcaatttggcaatggcatcagaaggctgatgaacaggagagactttcaaggaaagcctaattttgaagaatactttgaaattctgactccaaaaatcaaccagacgtttagcgggatcatgactatgttgaatatgcagtttgttgtacgagtgaggagatgggacaactctgtgaagaaatcttcaagggttatggacctcaaaggccaaatgatctacattgttgaatccagtgcaatcttgtttttggggtcaccctgtgtggacagattagaagattttacaggacgagggctctacctctcagacatcccaattcacaatgcactgagggatgtggtcttaataggggaacaagcccgagctcaagatggcctgaagaagaggctggggaagctgaaggctacccttgagcaagcccaccaagccctggaggaggagaagaaaaagacagtagaccttctgtgctccatatttccctgtgaggttgctcagcagctgtggcaagggcaagttgtgcaagccaagaagttcagtaatgtcaccatgctcttctcagacatcgttgggttcactgccatctgctcccagtgctcaccgctgcaggtcatcaccatgctcaatgcactgtacactcgcttcgaccagcagtgtggagagctggatgtctacaaggtggagaccattggcgatgcctattgtgtagctgggggattacacaaagagagtgatactcatgctgttcagatagcgctgatggccctgaagatgatggagctctctgatgaagttatgtctccccatggagaacctatcaagatgcgaattggactgcactctggatcagtttttgctggcgtcgttggagttaaaatgccccgctactgtctttttggaaacaatgtcactctggctaacaaatttgagtcctgcagtgtaccacgaaaaatcaatgtcagcccaacaacttacagattactcaaagactgtcctggtttcgtgtttacccctcgatcaagggaggaacttccaccaaacttccctagtgaaatccccggaatctgccattttctggatgcttaccaacaaggaacaaactcaaaaccatgcttccaaaagaaagatgtggaagatggcaatgccaattttttaggcaaagcatcaggaatagattagcaacctatatacctatttataagtctttggggtttgactcattgaagatgtgtagagcctctgaaagcactttagggattgtagatggctaacaagcagtattaaaatttcaggagccaagtcacaatctttctcctgtttaacatgacaaaatgtactcacttcagtacttcagctcttcaagaaaaaaaaaaaaaccttaaaaagctacttttgtgggagtatttctattatataaccagcacttactacctgtactcaaaattcagcaccttgtacatatatcagataattgtagtcaattgtacaaactgatggagtcacctgcaatctcatatcctggtggaatgccatggttattaaagtgtgtttgtgatagtgtcgtcaaaaaaaaggtttttgaatagaaattacattctttgacaccctcagttctttcaaactttcaactctgcattttattgcattttctcatttaactgttagtatatgtttgaatataggctgactttttttctctattgcactttcttctttttttctttttagaaaataagcaattaggggttagatgcaatatgaatataaaatagttctgtaaataccaaatattatttttagttctggaagttaaaaatactctccatagtaacgtgtgttataataataaatatttcttttgtttgacttttttaaaattctacaatggtaaaagctattttaatccatgttagcaatttaattcctattaattcattttactatcataatagcaaagtattcagaataaaagaggtttatatcttctattaaaatgcagtaatactatttaaatcagggggccacgggggagaagatgtttcgggggggcccaaaagaagggtggacattttagcgataacaggggcctggaaatgtgcgctagagaaactttgtagggacgtgtgagagaaaaaaattgtgaaaaaacggggtattacataaggaagggagagaaaagaaaaaaaagaacggactan

SEQ ID NO: 21921 - DNA, 976 bp, Homo sapiens
  misc_feature 1, 2, 3, 4, 5, 6, 7, 8, 9, 10, 11, 974, 975, 976: n = A,T,C or G
nnnnnnnnnnncggagtacttctagaattaattaacgcggggggcgccgcctgcgtcctgcccactccaacgctgggtgacattgagctcaccagcgccaccgtccccggcgaagttctgcgctggtcggcggagtagcaagtggccatggggagcctcagcggtctgcgcctggcagcaggaagctgttttaggttatgtgaaagagatgtttcctcatctctaaggcttaccagaagctctgatttgaagagaataaatggattttgcacaaaaccacaggaaagtcccggagctccatcccgcacttacaacagagtgcctttacacaaacctacggattggcagaaaaagatcctcatatggtcaggtcgcttcaaaaaggaagatgaaatcccagagactgtctcgttggagatgcttgatgctgcaaagaacaagatgcgagtgaagatcagctatctaatgattgccctgacggtggtaggatgcatcttcatggttattgagggcaagaaggctgcccaaagacacgagactttaacaagcttgaacttagaaaagaaagctcgtctgaaagaggaagcagctatgaaggccaaaacagagtagcagaggtatccgtgttggctggattttgaaaatccaggaattatgttataacgtgcctgtattaaaaaggatgtggtatgaggatccatttcataaagtatgatttgcccaaacctgtaccatttccgtatttctgctgtagaagtagaaataaattttctttaaataaaaaaataaaaaaaaaaccttccaaaaacaaaaaccaggcacaaaatttgggcgcgcccggcctgaaaattttaaacacttgtgggcgcgcccctgtaggaactggcccgtgctcacggaccgggcagacagggtggttccaaaaaacccgggccgcgtgaaacccagggcggggcggtttcaagcccggaacnnn

SEQ ID NO: 21922 - DNA, 269 bp, Homo sapiens
  misc_feature 269: n = A,T,C or G
acgagggccatagctagcaagatcctccaaacatgaggtagaacttggtgcctcctgcctcagagcttctggaagccttggggaaggcaagcgtgttcctgggcagaagaggagcaggaagcactggatctgctgaatcttcagttttctgtctgaggctggcttgaggcgagggatgcggaagaatgttctccaagggggtcattcactcaaggcaccatcccgcgcccccggcgctgagagcatggccaggtgccgcgtggggatcn

SEQ ID NO: 21923 - DNA, 2668 bp, Homo sapiens
  misc_feature 1, 2, 3, 4, 5, 6, 2618, 2661, 2662, 2663, 2664, 2665, 2666,2667, 2668: n = A,T,C or G
nnnnnnaatgcccaaaacataatttatttattagagatggggtcttgctatgttgcccaggctggattcaaaatcctgagcccaagcaatccctcctgcctcagcctctcaagtagatgggacaataggcgcacaccaccatacctggctgtaagccacatactttaaatggacctaatttccaagcctggctgcctgatagaatgtgctttggtcagctagaattgataccatgttagagggtcagctgcacacaaaaatggtgttgctgagagaaatggcacattatacctggtactccttagaggtgctctatctactgtatcaatatagccattaaaagctcaatctgccagctgtttttgaaagacccaataatactgttatgactatataagataaccttgatgtatgtcactttatgatacgtgttacttaacatgactcccggggggccctggcttagagctgattccaaaggcacacagcttaggtcaaattataggacacataatatttactattttatttactgcctaaaatgtttctcaacaactaacaagtacaggaaacatttataggtagtaatgtaagtaccttatgagctcaatgacaaaacagtgaattacagacagttggaagatggggaccatgtcttagattccttttgaacactcctcagtgtccagtgtggtgatatgcacataaccagtatattttagtaagtatttacccaagtaagacttctttaggcattccattttgggattcttgtagaaagaagccaattttgtagaactcctaggctttaaacattcgagaatgaaaggctcttgccattactgatcataattcaaaaagctggtgttaagtgtgacaagtggtgactgttccatatatgccaacaggcatacagcagaatccagacagagtatatagtagcgaaaaagatgggagaatatgaagaacaaagtctattttaacattaattatggctataataacccttatgaggaaatactggtgagcaggataaagtgatattgaaaagaaaaaaaggaaaactcctcaaaacacaataaagcatattctaacaggtttttggaaaaagttgcaagccttttaattcattgacctcttttgactgattggaatttttaccattctgtacactctgaattataactaaacaactacatgttactgacaaatttgtgattctttgagtctaaacaacacagaaactagaagatccctttcctagatttatatacttgattttcttataaaaataacttcagttattatgtcaatatttatctgaaaaaggcagccctctgacagtaaactagtaactggaataactacagtatcattataagctacagtaaaacaacctgtaaagtaatttttcctatttgaataataaatagactggacaggagtgaaaaaccaaaactatgaaagaaaaacccaatgtaaataaaggatacaggtcaaaacaaagttcagaaggcaaatatgtaaatattagatgcctcaaaaatcaactatcagtgggaaaatttctatgaaagcaatttcagaaaatacatgaacacatatatctttaaaatatagaactctaaatacttgataacatatttaggatactctacaatgcccagttaattgctataatttttttccctcaggttttcctggatgatacagcaaactacagaatttgtgcacttactgttgctcaaatttgtgtacttactgtgtgcacatatactgctgcactgtttctcggctgtgaaaaattaaaagcattttttcaacctttgagaaggaaagaaaacaatgaagaatctcctcataataatacagcataacagggtttgtttactgtgccacatcatgggtgtttttaaaacgaaatataaatatatggttagggatagcatttttaggagaacaagtgaccaaaaactaagttacctcttttcaggtcagccaaaaaacgtgaagggaaagtggactttatacaacttagacatttatgtagatagcacagcagactcatgttcaagccagccacctgaaacattataagtccgtcgagggggacagcaatctatggtccatggactgaatccagcctacttttgtatggctctgagctaagaatcgttttaatattttttaaaggttgttaaaagcaaataacaaagaatacatgatgactctattcttgttctcatgtgtgaaccatatattatagcctgcaaagtctaaaatatttataaaccggccctttacagaaaaagtttgcagacccttcttttacaccagtgctgtagataattctggcagtacaactgcaagtctaagataatgttcattcattcccatcataaatgtaacattctaaataggtgtcttctgatgtcatctgtcagaatttcttttaaactttttcttcatcttcaacattatcaaagttcatccttattcctcttgccttcgagacgtccggagagtttccaatttttcacttattaaggcagcgattgcttttgcatctctggtatttatctgctcttcttgaaaatttctctaaaattaaaaacacntgttatcttttaagtatttaataaaaacataacatttccaccnnnnnnnn

SEQ ID NO: 21924 - DNA, 1735 bp, Homo sapiens
  misc_feature 1, 1734, 1735: n = A,T,C or G
ncctgagaccctcctgcagccttctcaagggacagccccactctgcctcttgctcctccagggcagcaccatgcagcccctgtggctctgctgggcactctgggtgttgcccctggccagccccggggccgccctgaccggggagcagctcctgggcagcctgctgcggcagctgcagctcaaagaggtgcccaccctggacagggccgacatggaggagctggtcatccccacccacgtgagggcccagtacgtggccctgctgcagcgcagccacggggaccgctcccgcggaaagaggttcagccagagcttccgagaggtggccggcaggttcctggcgttggaggccagcacacacctgctggtgttcggcatggagcagcggctgccgcccaacagcgagctggtgcaggccgtgctgcggctcttccaggagccggtccccaaggccgcgctgcacaggcacgggcggctgtccccgcgcagcgcccgggcccgggtgaccgtcgagtggctgcgcgtccgcgacgacggctccaaccgcacctccctcatcgactccaggctggtgtccgtccacgagagcggctggaaggccttcgacgtgaccgaggccgtgaacttctggcagcagctgagccggccccggcagccgctgctgctacaggtgtcggtgcagagggagcatctgggcccgctggcgtccggcgcccacaagctggtccgctttgcctcgcagggggcgccagccgggcttggggagccccagctggagctgcacaccctggaccttggggactatggagctcagggcgactgtgaccctgaagcaccaatgaccgagggcacccgctgctgccgccaggagatgtacattgacctgcaggggatgaagtgggccgagaactgggtgctggagcccccgggcttcctggcttatgagtgtgtgggcacctgccggcagcccccggaggccctggccttcaagtggccgtttctggggcctcgacagtgcatcgcctcggagactgactcgctgcccatgatcgtcagcatcaaggagggaggcaggaccaggccccaggtggtcagcctgcccaacatgagggtgcagaagtgcagctgtgcctcggatggtgcgctcgtgccaaggaggctccagccataggcgcctagtgtagccatcgagggacttgacttgtgtgtgtttctgaagtgttcgagggtaccaggagagctggcgatgactgaactgctgatggacaaatgctctgtgctctctagtgagccctgaatttgcttcctctgacaagttacctcacctaatttttgcttctcaggaatgagaatctttggccactggagagcccttgctcagttttctctattcttattattcactgcactatattctaagcacttacatgtggagatactgtaacctgagggcagaaagcccaatgtgtcattgtttacttgtcctgtcactggatctgggctaaagtcctccaccaccactctggacctaagacctggggttaagtgtgggttgtgcatccccaatccagataataaagactttgtaaaacatgaataaaacacattttattctcaaaaaacctaccacaaaactttaatgctcgcgggattccatctgcacgttaaacaaaagcaattgttatgcttgtgcacatggcaagccagaggccctaattgtcccctttccactann

SEQ ID NO: 21925 - DNA, 559 bp, Homo sapiens
  misc_feature 331, 542, 543, 544, 545, 546, 547, 548, 549, 550, 551, 552,553, 554, 555, 556, 557, 558, 559: n = A,T,C or G
actagttgggcgagacctaaaattccctgggcacaggttgcacctgggtgtgagcacttaatcactcaacgcttgttttcttacacttgaaaatcaagggaaagagtagtacgcgggatgtatatttctaacgtaaaaaacataatttttttcttttcaagattttttcttaacaagatgagagaaacatattttttcaggaaaaacaaactttaaaaaaaaagaggagaaataaaaccttttctcccctttccccatcctctatctatccctctttcccaggaacaaatcaaaaggtggattatcttctgaagaatggaaactgccagtncagaatgatgtctttttctcaatgcagtgagttatagattctctagttttctccctagggatgggaagggggcattgaggcaagcctggagaggagcccggggagcaaggtcatgaacttttttctttagtgaaggaggaatacaatcaagggttttgtattcagaatgttgtgccatattttggaatgggacattggtgtggttagagannnnnnnnnnnnnnnnnn

SEQ ID NO: 21926 - DNA, 627 bp, Homo sapiens
  misc_feature 1, 621, 622, 623, 624, 625, 626, 627: n = A,T,C or G
ngctggactagtgatcactgtcattgtcattgttggagccattcttttcgtcccaggtgaatattcattaaagaatgctactggccttggtttaattgtgacttctacagggatattaatattacttcactactatgtgtttagtacagcgattggattaacctccttcgtcattgccatattggttattcaggtgatagcctatatcctcgctgtggttggactgagtctctgtattgcggcgtgtataccaatgcatggccctcttctgatttcaggtttgagtatcttagctctagcacaattacttggactagtttatatgaaatttgtggcttccaatcagaagactatacaacctcctaggaaagctgtagaggaaccccttaatgaataactgaagtgaagtgatggactccgatttggagagtagtaagacgtgaaaggaatacacttgtgtttaagcaccatggccttgatgattcactgttggggagaagaaacaagaaaagtaactggttgtcacctatgagacccttacgtgattgttagttaagtttttattcaaagcagctgtaatttagttaataaaataattatgatctatgttgtttgcccaannnnnnn

SEQ ID NO: 21927 - DNA, 1337 bp, Homo sapiens
  misc_feature 1336, 1337: n = A,T,C or G
ccacgcgtccgggattttgttttacatctagttaggagaagaaaagtaagtgaaggaatcctctgatcatattgatcactatagaagcaaaagccaaatcagttcccttcattatcagtatttctcatgctgtacacaataaatttgttagactgagtacttggtttttgtttaatagaacaaataatcagtgtttcacttatattactaaatgtgaaaaacataatgtgaaaagtatacatacattaacttggttgtaaaactcattttaagtgttcatgtaatgtggtaagtttaaaaagtgaagtgagctgttttactacaatgaattcgtttgactcaaagattaaaatgcccctccccctatgtgtatctcttatggcctgtaataattgaaagcaatgtttttgcagtttatataatgcaatttttaatctgtgttcaaaaatggagttcatatgggcttaacacatgaaatgggtggcacagatccacttgcagaacccaaagatacacaatcagttttgaaatgcaacttaagccattaattgttggtgtgaatttaaaattttctagtgtttgtatggtggtatgctgcctaagagcaaagcatcctctgcacaaaagaaaattactgtagtggcttcgattttaattagaattttctccctggtgtttctttatagactaaagcaaaatcttttaagtttcttactacaggtaaaagctatgtgcaagaacctcaaaatgctaaaatctagcataatgccttagatctgtttttaagtcttgtatattcctacatagctgtccgatgtattatatttgtatagtgaattgtgtacaatttttgaataagtgcatcatcacttaacctttatgttgtttgaatagtgatgatgatacatttcttcagacatttaactgtcatttttttcctttgtcatttgtgagttttatttgtacagttcctcatgaagttgcatctgagatgtgtgtatatgaaaagattatacaagggtaaaattaagcaatatattaactatggttcttcaggagaaagcttacagtgtttcaggttgtgctttatttcaaaatcgggttgctccggcctcctttgtcaccgccttgggttcggtttcgcgggccgtctgccgcggcacttttccgcactttcaaattttaaatacatttatgcaagttaatattgctttgctgatgctatttgcttatttgatgttaaataatgctattgtaaataaagaattctgttgttattgcatcatttaataaattttaatgccttcgggttttacatggcaaaaaaaaacctcgnn

SEQ ID NO: 21928 - DNA, 510 bp, Homo sapiens
  misc_feature 277, 278, 279, 280, 281, 282, 283, 284, 285, 286, 287, 288,289, 290, 291, 292, 293, 294, 295, 296, 297, 298, 299, 300,301, 302, 303, 304, 305, 306, 307, 308, 309, 310, 311, 312,313, 509, 510: n = A,T,C or G
actatcattataccctttccctcaatgccatcttacattttagggataagttttaagccaaactataaggctacctggaatgctgagacaacacacaaattctgctgagtccccgtcacagactacttctgaaggtcaccagtgagggcctaaacaagagtccacttcttgttagtataataactttttatttgacatctacaagattttggcatcttgcagctttttaccaggtttatacaatctcgatttttcaatagtgcaacctgtggaagcnnnnnnnnnnnnnnnnnnnnnnnnnnnnnnnnnnnnncggttatggagcctctctcctctgcaacctgataggatttggctacccagcctacatctcaattaaagctatagagagtcccaacaaagaagatgatacccagtggctgacctactgggtagtgtatggtgtgttcagcattgctgaattcttctctgatatcttcctgtcatggttccccttctactacaatgcnn

SEQ ID NO: 21929 - DNA, 1803 bp, Homo sapiens
  misc_feature 541, 542, 543, 544, 545, 546, 547, 548, 549, 550, 551, 552,553, 554, 555, 556, 557, 558, 559, 560, 561, 562, 563, 564,565, 566, 567, 568, 569, 570, 571, 572, 573, 574, 575, 576,577, 578, 579, 580, 581, 582, 583, 584, 585, 586: n = A,T,C or G
cgacccacgcgtccggaatatgtgtgctgccctcagacaaagattattggatctgtgtcaaaagaagaggaagaggaagatgaagaggaagaggaagaggaagatgaagaggaagactatgatgtttataaaagtgaatttcctactgaagcagatctggaagacttcacagaagcagctgtggatgaggatgatgaggatgaggaagaaggggaggaagtggtggaggaccgagattactactatgacaccttcaaaggagatgactacaatgaggagaatcctgctgctttccttcggaatccagtgcttccacagagattagcctgtagcttatatttgacattcttcactgtctgttgtttacctaccgtagctttttaccgttcacttccccttccaactatgtccagatgtgcaggctcctcctctctggactttctccaaaggcactgaccctcggcctctactttgtcccctcacctccaccccctcctgtcaccggccttgtgacattcactcagagaagaccacaccaagnnnnnnnnnnnnnnnnnnnnnnnnnnnnnnnnnnnnnnnnnnnnnnacagcccacttccattgtattgtctgacacatgctctcaatatataataaatgggaaatgtcgattttcaataatagacttatatgcaggctgtcgttccggttatgttgtgtaagtcaactcttcagcctcattcactgtcctggcttttatttaaagaaaaaaaaggcagtattccctttttaaatgagctttcaggaagttgctgagaaatggggtggaatagggaactgtaatggccactgaagcacgtgagagaccctcgcaaaatgatgtgaaaggaccagtttcttgaagtccagtgtttccacggctgggatacctgtgtgtctccataaaagtcctgttcaccaagggacgtttaaagggctttttatcccagcgtctttctaggagagcttagtgtatacaagatgagggtgtccgctgctgctttccttcggaatccagtgcttccacagagattagcctgtagcttatatttgacattcttcactgtctgttgtttacctaccgtagctttttaccgttcacttccccttccaactatgtccagatgtgcaggctcctcctctctggactttctccaaaggcactgaccctcggcctctactttgtcccctcacctccaccccctcctgtcaccggccttgtgacattcactcagagaagaccacaccaaggaggcggccgctggcccaggagagaacacggggaggtttgtttgtgtgaaaggaaagtagtccaggctgtccctgaaactgagtctgtggacactgtggaaagctctgaacaattgtgttttcgtcacaggagtctttgtaatgcttgtacagttgatgtcgatgctcactgcttctgctttttctttctttttattttaaatctgaaggttctggtaacctgtggtgtatttttattttcctgtgactgtttttgttttgtttttttcctttttcctcccctttgaccctattcatgtctctacccactatgcacagattaaacttcacctacaaactccttaatatgatctgtggagaatgtacctatttatgtgggccttcagtggatgggcagtgccactcaggtctctggggtttccctctctaattttaagtaaattgacatataactactatgcttataaaaatgaagtaaggaaaacaagtagtcctgtttgccactaaaaacattttcaaaggaaaaataaaatg

SEQ ID NO: 21930 - DNA, 760 bp, Homo sapiens
  misc_feature 1, 2, 3, 4, 5, 6, 7, 8, 9, 10, 11, 12, 27, 732, 733, 734,735, 736, 737, 738, 739, 740, 741, 742, 743, 744, 745, 746,747, 748, 749, 750, 751, 752, 753, 754, 755, 756, 757, 758,759, 760: n = A,T,C or G
nnnnnnnnnnnncggaagtcttctagnattaattaacgcggggatatagttcctggcacatagtaagtactcagtaaatactaagttttcccccaggttctaagttttctgtaatgcatcattttacttttaccattaaaaaatgttattattgttaagctgctctatttctgaaaaaccctcttacgatcatacacatagaaaatataaaagaattgacaaaataactcctggaaccaataagcaattatagcaaagttgtagcatacaaggttaatatacaaaggtccagtggctttcctatatatcagtaatgaacaagagacatttgaaattaaaaacatattgctgtttacattagcatcaaaataaatgaaatatttagctataaatctatcaaaatatgtataaggtctatatgaagagcaaaaactctgatgaaaggtatcaaagaagaactaaataaatgaagagataatccatgttcatgaagaggagaactcaatattgtcaagatgtcagtgcgtcccagcttgttctaatgcaattccaatcaaaatcccaggaagttattttgtggatatcaacaaagtaatttgaaacttcctatgaaaaaacaaacgactcagaatagcaaacccaatatcgaagggaaagaatagagcaagaggactgaaatcacttgagttcaagacttactatgaagccacagtgatcaagacaatgtggtannnnnnnnnnnnnnnnnnnnnnnnnnnnn

SEQ ID NO: 21931 - DNA, 2654 bp, Homo sapiens
  misc_feature 1, 2, 3, 4, 5, 2592, 2594, 2654: n = A,T,C or G
nnnnnattcttccagtaaaagcttcaacttcccacactgaagctgagagcctcccaaagtgctggctacctgctgagcgcccccgtaactctgacacagtagtaatttgagcctctgcaattgccgtctgcttcctgtgaaagtcctttccgtgcccactgacccttgagtgggcctttgagctgctgactttcagctggaacttgaagggaccccaaccctgagacactatggccctgacctcagacctggggaaacagataaaactgaaagaggtggaggggaccctcctgcagcctgcaactgtggacaactggagccagatccagagcttcgaggccaaaccagatgatctcctcatctgcacctaccctaaagcagggacaacgtggattcaggaaattgtggatatgattgaacagaatggggacgtggagaagtgccagcgagccatcatccaacaccgccatcctttcattgagtgggctcggccaccccaaccttctggtgtggaaaaagccaaagcaatgccctctccacggatactaaagactcacctttccactcagctgctgccaccgtctttctgggaaaacaactgcaagttcctttatgtagctcgaaatgccaaagactgtatggtttcctactaccatttccaaaggatgaaccacatgcttcctgaccctggtacctgggaagagtattttgaaaccttcatcaatggaaaagtggtttggggttcctggtttgaccacgtgaaaggatggtgggagatgaaagacagacaccagattctcttcctcttctatgaggacataaagagggacccaaagcatgaaattcggaaggtgatgcagttcatgggaaagaaggtggatgaaacagtgctagataaaattgtccaggagacgtcatttgagaaaatgaaagaaaatcccatgacaaatcgttctacagtttccaaatctatcttggaccagtcaatttcctccttcatgagaaaaggaactgtgggggattggaaaaaccacttcactgttgcccagaatgagaggtttgatgaaatctatagaagaaagatggaaggaacctccataaacttctgcatggaactctgagcaagatgtaaataaaattaaaaggtggatggcaagagtgcaaatactatcttcaatccttcagtcccagccagaagaatctctgaaagcatattgtgaatgtatacaatgtagtacaaacaatctctgtgatgattaacagtatgtcaccacttcattttttaaaaaggatcacgtctaatgcccattttcccaactattctttccaaagtaagatataaggtagcttaataaactaagtaaaacgtatgacttgagtacaataggattgttttaatccccattattctggaaagtgcatcctagtctcccagtctataacatcataataccttgaggtataagtccaaatattaggttatatctaatttaaaaacaaaatttctgtcatctgtcctggccattcaggcaactccagcctgggctcaatcctggagttctgtctggtcactatcagaaggaacactttgagggaaaccctggtgcagccagccctgaggaaacatggcctgagtgccctcactggtgggtgggaataaaatggaagtgcacagaggagatgtcagaagaccaaaacttggtgaatagtcccagtgctaggtcatataggaaacagaaagcatgacagtggccttttgggaacccaagttacgtcctggtgaaagcagaaaggaggagacaggatggctgtcaacaacgtcagcatgggcatggctcccaggcatggaggtaattgggtcttggcttcaatgccacccttttgggaagccctaaaccaagtgaggtgttcttttcccttgcttcccatatttgtcccagttgcagccctgttgttatgtatttactcttcaatttcttatttatacctctcactcaattgttaattctttgggttcagtctcatgccatatttactcctagtacctaatgcagtgcctggcacacagcaagtgcccttgagaacttgtagagggagtaaaaaagtgcatggataaatgactgcagcaaatcacaaattttgaactttgacccttttcttttagtcccaaatagtggcattccatagctgagggtagtaggagcagttcaccctgggagcagacaataagaggaagaatgaagccaactaaaattctgaatgctttttgttggatttcgtagggtattttttttaaaatagggtcttgctatgttgcccaggctggtcttaactgactgctttttattattaccatgcactggcaattccaaacaatgtcagtgttaaaatgcttctccctgaaaaagagaaaaaaaaaaggaaaaaaagaaaagaaaagtgaaaagaaaaactcttattggcctaagttctaaataatagctaggttaccactgagttttaactatatgtatatgagcttcaaataagcacctttttattatgtaaataaataaaagttatctgtatccccactgcattgtaaaatttttntngttttgtttcatgtcttattcacctttgtatggaaattaattcagaaaccccaagcatan

SEQ ID NO: 21932 - DNA, 10172 bp, Homo sapiens
  misc_feature 1, 2, 3, 4, 5, 6, 7, 8, 9, 10, 625, 9644, 9646, 9658, 9667,9671, 9674, 9675, 9691, 9696, 9697, 9700, 9715, 9717, 9726,9736, 9737, 9738, 9741, 9743, 9754, 9760, 9768, 9771, 9773,9782, 9784, 9800, 9844, 9921, 9939, 10171, 10172: n = A,T,C or G
nnnnnnnnnnaagacagggtcaaaaacacatatactaatggtgaccatgatattggccaggtgtggtcactaaagaatggtgggcactggcatccagtggagaactcatgccccatctaacagtagaagatctagccatttgataccatgtaggaatgctcagtgttagcagattgtttcattattcaggagatgctggaacttcagatgtatatgtaaagctttcctgaatttaaacagggtatgtcagatgaaacaggtctgttgactgaatctggcccatggtcaattgatttgtgacctccctacattaggcacttgttggcacctttctattgcattataactgtcctgaaggcccgaggtggaaggggagatgcagaataaggcggagatggaacaatgagatgacaagagatgaaagacttcaagaaggatggatgattgcctatttcagagattctgcagagggcaacagaaatgggaataagaaaaggctattagattaaagtaaattaattatttggcacagcactacgtctacaggctgtgttctttaaagaaatgatcaaataacatgggaaatagttaagcaaattaaaatactttgtttactctgactctngtaattgtctttaatattctattatgcaatgtaaatctccaaaaggagaagagatttactgagattttttaaactttcatgatcaaggagtccctaggtcatacaatcccttgtagatagaatgttttgaggaaaacaccttggaaaagctggataagagactgaatgagtcactgggagtctatggaggcctgatgtggagactggaatgcacatggtagtgagcaaatgcacaatgagccagcgcagcagcttggcaagtaaagaaagtaggccaacctattaggaactaggaattgccagcttagtaatctttttaagacaaaaccattttagcattattcctttgctgaaaacaaaccagcgaaaacaaaaacaaaaacaaaacaaacaaaaaacaaaaaaaagcatcaaggggtgccctcctctgatgggtgaaatctccttgctttaacattccaggtctcctttatcaggccagctgacctttcttattccccagttgttccctggcctttctcattccccagttatttcctatgcttactccctgctctaaactccactggctgtccttattgcttgcatggtgagttgtctccccagctgctccagttagagaaatgcctgctttccaaggcacaggtcaaaccctgctttgcctattaagccttccttagccatcaagctaccagtcagttcttttccttacacaactggatcagttacttctgaaggacttgcatgggacttagtgtgttggagatggcctgtatgatttggagccaagagaataaaactatgtcttgagatctgcagctctctacccccatttgccctcacagtacacccaaatagggttaggataatattgcccagaaacacagaagagcaagggcataactccaatcacattgcatttcatagattgtggtctatagttatacaaccacctattattcattgagggtaaaggagtgtattctcttttatagacttgctcaacagtaaagagcatcatttctagacactaggctgagtatgttacatgtttatcatggtgaatcccagaatctccctaagaatagtgttattattcccattttacagaggagggagctgtcttgaaacattcaagtcagcttgttcacacttaatgaccagctctctatctggtgaaggtcgagtcaggtgtacctgacctcatgtacctgaccccaaacctgggctctttctgtcccagcacaccatctccatggccatgctggccactagaaatttaatgacagagaattaaaggtaagaatcacactgtgccttcaagtggcaaatatataccaccagacagaggaagacagataaaatctagttagggtctacacagtttgaatatcataggactcggtgcattctggggtatcataaggacctagcacagctcaagagaggccctcttgagtgagatttggaggatgcaacatcatgggggcacatgcctggcccgcagggcagtgagagtcttctactccctggccattcgtcagtgtcaccgaaggaggtgaccttcatttccaccctactctaagctcttggcttttctgtctcctttactagactgtgaactctgaggagagaaactattttatttatccagccctgtcatagtttctggtatataaacagtaactatttgttggtttgatgaatgaatgacaagtcagccaaggcaaggtgctcaaggtgacatgatagagacagcatgatagagacagcacctttattcccccatcagagagctggattacctcactgcatgttatgtgtctcctccgtttgtttatacactatccagaagtctctggcttctcagaatgcttgacaaattccaagtcctcccttcaataatgtcaaaccttataattttcaggcctcatcgaagattgtgaaatcctgcagcagcacaagaggtgtctgctgcccctcacactttccccacatcttccaacacactgccttgcacagagcagggtctatatacatgcacattgaatgactgcattgaaatagattggagacatggttaggaacctgtcctaacagtgcaatcttcttgagacaatgcttggtgaattcgggtgataaaaggagaagaaatcaggatagtgacagtgacatagatggggcaagaagagtgagcaggatctgtcaacttattggatatgggaggtgagggaggaggaagagaaaaaatgattcaaatactttgatctcagctgacagtttgaaggattatgcccaaaggggaaatagggaagttctctttccccatgaccctctcatcctcatttcagtttaagcatggagaaaagatttcccataaaagtcaggctgaaacactccatggagggagacagacctgggacagtcattcagtaatgtccaggaaaaccagaaggaaaggtttgccttcatctctctgcagaagagctttgctctgctgaggaggagaaatttgagctgaatgtatttctggttggtatgacttgtaagttctctgtttgatagcagagttgtttgaatgacctattttataactacacagagcttttccaaatagatggtgtctgtagaatgttcaggttaatgcatgagccgagtgctcagagtgtttgcacttggagcatctgagccttctttcttaataagtcatcttggcattttgtcaacaagttaatttgctttcctaagaaactagattaatacttcctgtactttgtgctattcacagatctacaatgcagtgagaagagaagaaacagaaaatacagttggatctctactccatttcctcaccaagctcccagcctccgagacagcccatggaaggataagcgttggtccatgcttaaagcaatgtgtccgagacactgtatgtgagtatcgcgccaccctccaaaggacttcaatatcgcagtacatcaccggttctctcctagaagcaaccacgtctttgggagcaagaagtggccttctcagtacttttggaggatccactggacgaatgatgctgaaagaacgccagccaggcccctctgtggccaattccaatgccctcccttcaagttcagctgggatcagcaaggagctgatcgatctgcagcctctcatccagttcccagaggaagtcgccagcatcctgatggagcaagagcagactatttacctcagggtcttgccagtcgactacctttgcttcttaacacgggacttgggcactcctgaatgccagagctccttgccctgcctcaaagcatccatctcagcgtcgattcttaccactcagaatggagagcacaatgcccttgaagatctggtgatgaggtttaatgaggtgagctcctgggtgacatggctgatcctcacggcaggctccatggaggagaagcgagaagtcttttcatatttggtgcatgtggccaaatgctgctggaacatgggcaactacaacgctgtcatggagttcttggctggcctcaggtcaagaaaagttttaaaaatgtggcagttcatggaccagtctgatattgagaccatgaggagcctgaaggatgctatggcccagcatgagtcctcttgtgagtacagaaaggtggtgacacgtgccctgcacatccctggctgtaaggtggttcaagggtgtggggtgtttctgaaggagctctgtgaagtgcttgacggcgcctccggtctcatgaagctttgcccgcggtccaattcccaagaagaaactttagagtttgtagcagattacagtggacaagataatttcttacaacgagtgggacaaaatggcttaaagaattcggagaaggagtccactgtcaacagcatctttcaggtcatccggagctgcaatcgaagtctggagacagacgaggaggacagccccagtgaaggaaacagctccaggaaaagctccttgaaggataaaagccgatggcagtttataattggagatttgttggattcagacaatgacatctttgagcaatccaaagaatacgactctcatggttcagaggactcacagaaggccttcgaccatgggacggagctcatcccttggtacgtgctgtccatccaagccgatgtgcaccagttcctgctgcagggggccacggtcatccactacgaccaggacacacacctctctgcccgctgcttcctccagcttcagcccgacaatagcaccttgacctgggtaaagcccacaactgcctccccagccagcagtaaagcaaaacttggtgtacttaataacacagctgagcctggaaaattcccactactgggtaatgctggattaagtagcctgacggaaggggtcttggatctttttgcagtgaaggctgtatacatgggccaccctggcattgatatacacactgtgtgtgttcagaacaaactgggtagcatgttcctgtcagagactggtgtgacattgctctatgggcttcagaccacagacaacagattattgcacttcgtggcaccaaagcacacagctaaaatgctcttcagcggattattggaactcactagagctgtgagaaagatgaggaaattccctgaccaaagacagcagtggctgcggaaacagtacgtcagcctttatcaggaggatggacggtatgaaggcccaactttggctcacgctgtggagttgtttggtggcagacggtggagtgctcgaaaccccagccccggaacatcagcaaagaatgctgagaagcccaatatgcagagaaacaataccctgggcataagcactaccaagaaaaagaagaaaatcctcatgaggggtgagagtggagaggtaactgacgatgagatggcaacccgaaaggccaagatgcacaaagagtgtcgaagccggagtggttctgatcctcaagacattaatgaacaagaagaatcagaggtgaatgccatcgctaaccctccaaaccccctcccttccagaagagcccactctttgaccacagctgggtcccccaacttggctgccgggacgtcatctcccatcaggccagtgtcctcccctgtgctgtcttcttcaaacaagagcccatccagtgcttggagcagtagtagctggcacgggcggatcaaaggcggcatgaagggatttcagagcttcatggtttcagatagcaacatgagttttgttgaatttgttgagctgttcaaatcattcagtgtcaggagccgcaaggacctgaaggatctgtttgatgtctatgcagtgccctgcaaccgatctggctccgagtcagccccactctacaccaacctgacaattgatgaaaacaccagcgatcttcagcctgacctagatctgttgaccagaaatgtctcggatttggggttgttcattaagagtaaacagcagctatcggacaaccagaggcagatatctgatgccattgctgctgcaagcattgtgacaaatggcactgggattgagagcacatctctgggcatttttggggtgggcatacttcagctcaacgatttcctcgtgaattgccaaggagaacactgcacttatgatgaaatcctcagcatcatccagaagttcgagcctagcatcagtatgtgtcatcagggactaatgtcatttgaagggtttgccaggtttctgatggataaagaaaattttgcctcaaaaaatgatgagtcacaggagaacattaaagaactgcagctacccctctcatactattacatcgaatcttcgcacaatacctacctcacgggccatcagctcaaaggagaatcctcggtagaactctacagccaggtccttttgcaaggctgtcgaagtgtagaattggactgctgggacggagacgatgggatgcccatcatttatcatggacatacgctgacaaccaagatccccttcaaggaagtggttgaagccattgatcgcagtgccttcatcaactctgacctgccaatcatcatatcgattgagaaccactgttcattgcctcagcaacgaaaaatggcagaaattttcaagactgtgtttggagaaaagctggtgactaaattcttatttgagactgatttctcagatgatccaatgcttccttcacctgaccaactcagaaagaaagttcttcttaaaaacaagaagctaaaagcccatcagacgccagtggatatcttaaagcaaaaggctcatcagttagcatctatgcaagtgcaggcttataatggtgggaatgccaacccccgacctgccaataatgaggaagaggaagatgaggaggacgaatatgattatgactatgaatccctttctgatgacaacattctggaagacagacctgaaaataaatcatgtaatgacaagcttcagtttgaatataatgaagaaatcccaaagaggataaagaaagcagataactctgcttgcaacaaaggaaaggtttatgatatggaactgggagaagaattttatcttgatcagaataaaaaggaaagcagacagattgcaccagagctttctgaccttgtaatctattgtcaagcagtaaaatttccaggactgtcaactctaaatgcatctggctctagcagaggaaaagaaaggaaaagcaggaagtccatttttggcaacaatccgggcagaatgagcccaggggagacagcatcatttaacaaaacatctggaaaaagttcctgtgaaggcattcgacagacctgggaggaatcttcttcccctctcaacccaaccacgtccctcagtgctatcattagaactcccaaatgttatcatatctcgtcgctgaatgaaaatgccgccaaacgtctgtgtcgcaggtattctcagaaactgacccagcacaccgcctgtcagctgctgagaacttaccctgctgccacccgcatcgactcttccaacccgaaccccctcatgttctggctccatgggatacagcttgtggcactcaactaccagactgatgatctccctttacatttaaatgctgcaatgtttgaggcaaatggtggttgtggttatgtattgaaacctccagttctgtgggacaagaactgccccatgtatcagaagttttctccactagaaagagatctggacagcatggatcctgcagtctattctttaactattgtctctggtcagaatgtgtgccccagtaatagcatgggaagcccgtgcattgaagtcgacgtcctgggcatgcctctggacagctgccatttccgcacaaagcccatccatcgaaacaccctgaaccccatgtggaacgagcagtttctgttccacgttcacttcgaagatcttgtatttcttcgttttgcagttgtggaaaacaatagttcagcggtaactgctcagagaatcattccactgaaagctttaaaacgaggatatcgacatcttcagctgcgaaaccttcacaatgaagtcttggagatttctagtttattcattaacagcagaaggatggaagaaaattcctctggcaataccatgtcagcctcttcgatgtttaatacagaagaaagaaaatgtttgcagactcacagagtcacggtgcatggggtcccagggccagagccctttaccgttttcactattaatggaggcaccaaggcaaagcagcttctgcagcaaattctgacaaatgaacaagacatcaaacctgttaccacagactattttttgatggaagaaaaatattttatatctaaagaaaagaatgaatgtaggaaacaaccattccagagagccattggtccagaagaggagatcatgcaaattttaagcagctggtttccagaagagggatacatgggcaggattgtcttaaaaacccagcaggaaaacctagaagagaaaaacattgttcaagatgacaaagaggtgatcttgagctcagaggaggagagtttctttgtccaagtgcatgatgtttctccagagcaacctcgaacagtcatcaaagcaccccgcgtcagcactgcacaggatgtcattcagcagaccttatgcaaagccaaatattcctacagcatcctgagcaaccccaatccaagcgactatgtgcttttggaagaggtggtgaaagacactaccaacaagaagactaccacaccaaagtcctctcagcgggtccttctggatcaggagtgtgtgtttcaagcccaaagcaagtggaaaggtgcaggaaaattcatccttaagctaaaggagcaggtgcaggcatctcgagaagataaaaagaaaggcatttctttcgcaagtgaactcaagaagctcaccaagtcaactaaacagccccgaggacttacatcaccttctcagctcttgacctcagaaagtatccaaaccaaggaggagaaacctgtgggtggcttgtcctccagtgacacaatggattaccgacagtgactaagggcagcatgtttaacccaggtgaagatctttaagcaagaagttaaagagtgaacatggtggaaaaaatataattattttcatcagacttaaactggaaattgatgatttctgaactgaagccttcacacatgtgagatccatgctgaggagaagcaaaatggcacagggctagttgccaccaaccaatttactgatgaatgaagcccaggggactgccattttataaatgtcagcagttggaaaaatcgtcacgaattgacttagagcaagggtcagcaagcttgtctgtaaagggccaaacagtaaatattttagggctgggggccataaaatatgttgcaaccacccaattctgccattgtagtgcaaaagcagccatagacaacacatacatgaacgaacgtggctgtattccaataaaactttatttatggacactgaaaaaaaaaaaaaaaagggcggccgctcgagtctagagggcccgtagaaacccgctaatccccccccacgtgctgcatacananaatgcagccatntgttgtttncccntcnnccgtgccttccttgancctgnnaantgaagcactcccacngnaatttcacnaataaaatgnnnaantngcatcgttctngtttgngtaggtcncantntattcttgngncttatcatgtctggantccccgggtaccgagctcgaattaattcctcttccgcttcctcngctcactgactcgctgcgctcggtcgttcggctgcggcgagcggtatcagctcactcaaaggcggtaatacggttantccacagaatcaggggantaacgcaggaaagaacatgtgagcaaaaggccagcaaaaggccaggaaccgtaaaaaggccgcgttgctggcgtttttccataggctccgcccccctgacgagcatcacaaaaatcgacgctcaagtcagaggtggcgaaacccgacaggactataaagatacccaggcgtttccccctggaagctccctcgtgcgctctcctgttccgaccctgccgcttaccggataccnn

SEQ ID NO: 21933 - DNA, 1293 bp, Homo sapiens
cctaccaactcatggtggatgtgtttggtaattacgtcattcagaagttctttgaatttggcagtcttgaacagaagctggctttggcagaacggattcgaggccacgtcctgtcattggcactacagatgtatggctgccgtgttatccagaaagctcttgagtttattccttcagaccagcaggtaattaatgagatggttcgggaactagatggccatgtcttgaagtgtgtgaaagatcagaatggcaatcacgtggttcagaaacgcattgaatgtgtacagccccagtctttgcaatttatcatcgatgcgtttaggggacaggtatttgccttatccacacatccttatggctgccgagtgattcagagaatcctggagcactgtctccctgaccagacactccctattttagaggagcttcaccagcacacagtgcagcttgtacagtggtccttttcagagttggacttctagactcacctgttctcactccctgttttaattcaacccagccatgcaatgccaaataatagaattgctccctaccagctgaacagggaggagtctgtgcagtttctgacacttgttgttgaacatggctaaatacaatgggtatcgctgagactaagttgtagaaattaacaaatgtgctgcttggttaaaatggctacactcatctgactcattctttattctattttagttggtttgtatcttgcctaaggtgcgtagtctaactcttggtattaccctcctaatagtcatactagtagtcatactccctggtgtagtgtattctctaaaagctttaaatgtctgcatgcagccagccatcaaatagtgaatggtctctctttggctggaattacaaaactcagagaaatgtgtcatcaggagaacatcataacccatgaaggataaaagccccaaatggtggtaactgataatagcactaatgctttaagatttggtcacactctcacctaggtgagcgcattgagccagtggtgctaaatgctacatactccaactgaaatgttaaggaagaagatagatccaattaaaaaaaattaaaaccaatttaaaaaaaaaagaacacaggagattccagtctacttgagttggcataatacagaagtcccctctactttaacttttacaaaaaagtaacctgaactaatctgatgttaaccaatgtatttatttctgtggttctgtttccttgttccaatttgacaaaacccactgttcttgtattgtattgcccagggggagctatcactgt

SEQ ID NO: 21934 - DNA, 380 bp, Homo sapiens
  misc_feature 376, 377, 378, 379, 380: n = A,T,C or G
acgcggggtcagcattctaatccaagcaaggtggctcaaaacctcctattctgactgcacagcctcacaaggctggtgctaggataaacaaagtcaaacaactttattttctctaggacccctgggaacttctaatagcagaagtatttgctgggaatcaccaacaggaatttttagatacaacggaatttggcttaaaaagtcttatttctatggagcttctgcactgtaggaatatcttgtataattgcctgaaacttccagcaaagaggtctatcaactgtccaagggtcacccgaggggaccaaaaagcagtgctttaagctattctgaataacctggaggtcaagaagaagcgagagcctttcacagacannnnn

SEQ ID NO: 21935 - DNA, 1776 bp, Homo sapiens
  misc_feature 1775, 1776: n = A,T,C or G
acacatgggctttttaagagactgggaattccagggcccacacctctgcctttgttgggaaaggtttgtcctatcgtcagggtctctggaaatttgacacagagtgctataaaaagtatggaaaaatgtgggggtgagtattctgaaaacctccattggatagacctgctactgtgaggaggttaccccactgcaggatagtctctgcccaggtcttcatgggatgaagctcttgtcaacctaaatacaaacagagagaggttctctgaaagaagaggataattacttgggagtagaatattgcaatgggaatctgcttgccgttataaactatgtgcaaattcagggaggtaaacaagacaaagatgctccatagaaaatatgagaagaatctcataactgttttgagataattattgttagctacaaagatcaataacaagggtgatgccacaccaaggttggacaggcagttgctggacaggtgtccttgcagaaatatttttgtgtaaagttgaaatagcctttgtgcaaagttgtggtttttgtagacacttttgtaatagttttgtttccaggaacacaagcataagaatcctctcttcatagccttcttgggatttatttgtcagggttaaaaaacaattagtgacatcactttggttctgataaagttcacactcgctattgtaaaacttttcgaggcttgtcctaccaaggatcccatgtgtcaccaggtatcgaggtcttcagtctgaactaggctaggagcattgtggttaccacttttctgcaggttttggtggcccagggactcccagcatcgccttctgtccagtgtctgcctattcccctcttctttttttcttccttaggtgcccttttatcacatgcattgtctcagacccttctaatatgtgctcataaatgcatggcatcatctccttcccacattgattcactttcaattgccagataatagagaaacagattgggaaaccacttatgctccacttttttctttctctgcaagtatggaattttttgttctgctttgttgtttaaatttaagccaaaacttcttaatagaaggatatacaaatatttattggtttataccattgcacttactttgaagaagagatgctgaatattattaaaccattgtgttccctggtgggctgatggactgtgattttataaggtggtctcagccaattgcagcagctgttccctgtcagaggggctagaggtttggtgagagcagtggatgaggtgcagtggtgtgtttgttcactagaagcaagtgggagaaagctttgcctctttgtacttcttcatcttctcccctcaagtcctcagaatccacagcgctgactgtggagtgctgtggagctggcatggcccatacaggcaacatgacttagtagacagatgacacagctctagatgtccatgggccccacaccaactgcccttgcagcatttagtccttgtgagcacttgatgatttacctgccttcaatttttcactgacctaatattctttttgataatgaagtattttaaacatataaaacagtatggagcatgcggcatacgagatacccacgtatgtaccacccagcttaacgaatgctctactgtcatttctaaccataatctctttaaagagctcttttgtctttcagtatctcttccctgtttggaccacattacccttgatcatatgaagccttgggtggctcctgtgtgagactcttgctgtgtgtgann

SEQ ID NO: 21936 - DNA, 1002 bp, Homo sapiens
  misc_feature 1, 998, 999, 1000, 1001, 1002: n = A,T,C or G
natgtttgaagccagtgaggatgtagctataggcactaaagtgggcaatgtgactgccaaggatccagaaggtctggacataagctattcactgaggggagacacaagaggttggcttaaaattgaccacgtgactggtgagatctttagtgtggctccattggacagagaagccggaattccttcagtgataccacatctgtggatatcatagtgacagagaatatttggaaagcaccaaaacctgtggagatggtggaaaactcaactgatcctcaccccatcaaaatcactcaggtgcggtggaatgatcccggtgcacaatattccttagttgacaaagagaagctgccaagattcccattttcaattgaccaggaaggagatatttacgtgactcagcccttggaccgagaagaaaaggatgcatatgttttttatgcagttgcaaaggatgagtacggaaaaccactttcatatccgctggaaattcatgtaaaagttaaagatattaatgataatccacctacatgtccgtcaccagtaaccgtatttgaggtccaggagaatgaacgactgggtaacagtatcgggacccttactgcacatgacagggatgaagaaaatactgccaacagttttctaaactacaggattgtggagcaaactcccaaacttcccatggatggactcttcctaatccaaacctatgctggaatgttacagttagctaaacagtccttgaagaagcaagatactcctcagtacagaaggtagaagtgagtaacttttttcttgctccagagcaatccctgagtaactaagcctgcattattaacttacatgaccaaattattcataaaattaatttttgataaatacagagtgagaacaaagaaaattgaaaaatcttaccgaatatatatgtatatcatccgggttggaatacaatatagaaaattatctctattcagtataaaacatacttctaggaaacnnnnn

SEQ ID NO: 21937 - DNA, 399 bp, Homo sapiens
  misc_feature 395, 396, 397, 398, 399: n = A,T,C or G
actaaggatcaaccaggtttgggaagcccaaggacagatatatgccacccgaaatcatttctaatcctgccatttcatgctttcttgggctttctgaggagattccttgccacttctgtggggaaaacagacttcaggaggggccagggtgggtgagggttgcggagtcattgtgaatgtgcatgtggatctggggtgccacctgcattttgaccacctctagcagcaacatatggtggagagaagatgtttatgtgacctggctcaaccaggcttgtgagatcttcctggggcagatagctgataagcggttcattgggataaagtatataacatctcattgttcagaagagatcaccaatctactggaattttcttaactatagaagcttaannnnn

SEQ ID NO: 21938 - DNA, 1248 bp, Homo sapiens
  misc_feature 1, 2, 3, 4, 5, 22, 35, 1227, 1228, 1229, 1230, 1231, 1232,1233, 1234, 1235, 1236, 1237, 1238, 1239, 1240, 1241, 1242,1243, 1244, 1245, 1246, 1247, 1248: n = A,T,C or G
nnnnnaccgggcccccccctcnaaatacttctagnattaattaacgcggggggcctgcatccaggaaatagaggacttcggatccttctaaccctaccacccaactggccccagtacattcattctctcaggaaaaaaaacaaggtccccacagcaaagaaaaggaataggatcaagagatacgtggctgctggcagagcaagccagccgcaagtccacctagttcctgggaacccacctagtttggtgtcgaatgtgaatgggcagcctgtgcagaaagctctgaaagaaggcaaaaccttgggggccatccagatcatcattggcctggctcacatcggcctcggctccatcatggcgacggttctcgtaggggaatacctgtctatttcattctacggaggctttcccttctggggaggcttgtggtttatatcatcagacctcttccggggggcaacagaaatcaccatatttcttatgccccgctgtcggcagtttgggctgaacatgcaaggtgcaatcgctctgcagttggagtcatactcttcatcacagatttaagtattccccacccatatgcctacccgaccaatatccctaacgctggggtgtgaacctggaatggcgatttctggcgtgctgctggtcttctgcctcctggagtttggcatcgcatgcgcatcttcccactttggctgccagttggtctgctgtcaatcaagcaatgtgagtgtcatctatccaaacatctatgcagcaaacccagtgatcaccccagaaccggtgacctcaccaccaagttattccagtgagatccaagcaaataagtaaggctacagattctggaagcatctttcactgggaccaaaagaagtcctcctccctttctgggcttccataacccaggtcgttcctgttctgacagctgaggaaacgtctctcccactgtttgtactctcaccttcattcttcaattcagtctaggaaaccatgctgtttctctatcaagaagaagacagagattttaaacagatgttaaccaagagggactccctagggcacatgcatcagcacatatgtgggcatccagcctctggggccttggcacacacacattcgtgtgctctgctgcatgtgagcttgtgggttagaggaacaaatatctagacattcaatcttcactctttcaattgtgcattcatttaataaatagatactgagcannnnnnnnnnnnnnnnnnnnnn

SEQ ID NO: 21939 - DNA, 1993 bp, Homo sapiens
gcgtccgaaaggctgctaacaccctccatgagacacactctgccccaaccatcctgaagctacaggtgctccctcctggaatctccaatggatttcagtcgcagaagcttccacagaagcctgagctcctccttgcaggcccctgtagtcagtacagtgggcatgcagcgcctcgggacgacacccagcgtttatgggggtgctggaggccggggcatccgcatctccaactccagacacacggtgaactatgggagcgatctcacaggcggcggggacctgtttgttggcaatgagaaaatggccatgcagaacctaaatgaccgtctagcgagctacctagaaaaggtgcggaccctggagcagtccaactccaaacttgaagtgcaaatcaagcagtggtacgaaaccaacgccccgagggctggtcgcgactacagtgcatattacagacaaattgaagagctgcgaagtcagattaaggatgctcaactgcaaaatgctcggtgtgtccgtgcaaattgataatgctaaactggctgctgaggacttcagactgaagtatgagactgagagaggaatacgtctaacagtggaagctgatctccaaggcctgaataaggtctttgatgacctaaccctacataaaacagatttggagattcaaattgaagaactgaataaagacctagctctcctcaaaaaggagcatcaggaggaagtcgatggcctacacaagcatctgggcaacactgtcaatgtggaggttgatgctgctccaggcctgaaccttggcgtcatcatgaatgaaatgaggcagaagtatgaagtcatggcccagaagaaccttcaagaggccaaagaacagtttgagagacagactgcagttctgcagcaacaggtcacagtgaatactgaagaattaaaaggaactgaggttcaacctaacggagctgagacgcacctcccagagccttgagatagaactccagtcccatctcagcatgaaagagtctttggagcacactctagaggagaccaaggcccgttacagcagccagttagccaacctccagtcgctgttgagctctctggaggcccaactgatgcagattcggagtaacatggaacgccagaacaacgaataccatatccttcttgacataaagactcgacttgaacaggaaattgctacttaccgccgccttctggaaggagaagacgtaaaaactacagaatatcagttaagcaccctggaagagagagatataaagaaaaccaggaagattaagacagtcgtgcaagaagtagtggatggcaaggtcgtgtcatctgaagtcaaagaggtggaagaaaatatctaaatagctaccagaaggagatgctgctgaggttttgaaagaaatttggctataatcttatctttgctccctgcaagaaatcagccataagaaagcactattaatactctgcagtgattagaaggggtggggtggcaggaatcctatttatcagactctgtaattgaatataaatgttttactcagaggagctgcaaattgcctgcaaaaatgaaatccagtgagcactagaatatttaaaacatcattactgccatctttatcatgaagcacatcaattacaagctgtagaccacctaatatcaatttgtaggtaatgttcctgaaaattgcaatacatttcaattatactaaacctcacaaagtagaggaatccatgtaaattgcaaataaaccactttctaattttttcctgtttctgaattgtaaaaccccctttgggagtccctggtttcttattgagccaatttctgggttaatcttattgatttttcagcatcagtacaactctacaacctttgagctatatctgctttttcccattgcttccactgccttttaaaactcaacacagctttttgaataatttgagagtcaaattcaatcacaaatgctgagcgggagactggctc

SEQ ID NO: 21940 - DNA, 1036 bp, Homo sapiens
ggatggggacaccaaaaattccaccttctcggagatcttcaaaaaggagcacccggaccgcttcatcgagtgctacattgccgagcagaacatggtgagtcatcgcggtgggctgtgccacccgcaacaggacggtgcccttctgcagcacttttgcagccttcttcacgcgggcctttgaccagattctgctatggcctgcatctcccgaagagcaactatcaagccgtctgctggcgtcccacgtgcgagcgtttcccatctggcggaacgacttgtggcccttcccatgattggcccgtagtaagatcgtcggcgtagtgtttcggagtcagtccccgatcatcaacttgttcttttaccctaaagtgattgtgcgttgcgtactacgagaatggcacgtggaacttagcccgccaaatacaagatggcgtatcgtgctttcattccggaccagcctgcccagaaaatgccatcatctataacaacaatgaggacttccaggtcggacaagccaaggtggtcctgaagagcaaggatgaccaggtgaccgttatcggggctggggtgaccctgcacgaggccttggccgctgccgaactgctgaagaaagaaaagatcaacatccgcgtgctggaccccttcaccatcaagcccctggacagaaaactcattctcgacagcgctcgtgccaccaagggcaggatcctcaccgtggaggaccattattatgaaggtggcattggtgaggctgtgtccagtgcagtagtgggcgagcctggcatcactgtcacccacctggcagttaaccgggtaccaagaagtgggaagccggctgagctgctgaagatgtttggtatcgacagggatgccattgcacaagctgtgaggggcctcatcaccaaggcctagggcgggtatgaagtgtggggcgggggtctatacattcctgagattctgggaaaggtgctcaaagatgtactgagaggaggggtaaatatatgttttgagaaaaatgaaaaaaaaaaaaaaaaaa

SEQ ID NO: 21941 - DNA, 428 bp, Homo sapiens
  misc_feature 1, 2: n = A,T,C or G
nnatgactactagtatgactattaggagcggtaataccaaagagtgggactccggccccttaggcactgatcccacccacccttcatacatacccacaccactcccaccaccgtcatgatggaggaattacgttatacattcatattttgtattgatttttgattatgaaaatcaaaaaattttcacatttgattatgaaaatctccaaacatatgcacaagcagagatcatggtataataaatccctttgcaactccactcagccctgacaacccatccacacacggccaggcctgtttatctacactgctgcccactcctctctccagctccacatgctgtacacttttccatacattacatactcaaactggtcagccctggaaggcctatcatcagtggggttgtattcaccatcatccagggt

SEQ ID NO: 21942 - DNA, 3532 bp, Homo sapiens
  misc_feature 1, 3531, 3532: n = A,T,C or G
nggcagaagttgcagtgagccatgatcatgccactccagcctaggtgacagaacaagaccctgtgatttgcagatggattcgagacggaagcgggctggaaggcgtcggcggcggcagcgcacgtggtgacgtgcgagggggtgcggcgcgagcggtcggcggcggcggaggcagtgtctcccggtcgcgcgtggaggtcggtcgctcagagctgctgggcgcagtttctccgcctgctgcttcggcgcggctgtatcggcgagcgagcgagttcccgcgagttctcggtggcgctcccccttcctttcagtctccacggactggcccctcgtccttctacttgaccgctcccgtcttccgccgccttctggcgctttccgttgggccgattcccgcccgcttcctcctgcttcccatcgaagctctagaaatgaatgtttccatctcttcagagatgaaccagattatgatgcatcattatcacagaagaaattcgtgtctatagcttttaaggacttgattacatcattttcaagcctgatagttttggaatcaccattagagcttaagacacacctgccttcatttcaaccacctgtcttcataccctgacgaagtgcaccttttaacactcctttgtccttggattacttaagagttcccagaaatacatttgccaccaacagagtagccaaatttataaggaaaaatgattcccaatggatatttgatgtttgaggatgaaaattttattgagtcttctgttgccaaattaaatgccctgaggaaaagtggccagttctgtgatgttcgacttcaggtctgtggccatgaaatgttagcacacagagcagtgctagcttgctgcagtccctatttatttgaaatctttaatagtgatagtgatcctcatggaatttctcacgttaaatttgatgatctcaatccagaagctgttgaagtcttgttgaattatgcctacactgctcagttgaaagcagataaggaattggtaaaagatgtttattctgcagcaaaaaagctgaagatggatcgagtaaagcaggtttgtggtgattatttactgtctagaatggatgttaccagctgcatctcttaccgaaattttgcaagttgtatgggagactcccgtttgttgaataaggttgatgcttatattcaggagcatttgttacaaatttctgaagaggaggagtttcttaagcttccaaggctaaagttggaggtaatgcttgaagataatgtttgcttgcccagcaatggcaaattatatacaaaggtaatcaactgggtgcagcgtagcatctgggagaatggagacagtctggaagagctgatggaagaggttcaaaccttgtactactcagctgatcacaagctgcttgatgggaacctactagatggacaggctgaggtgtttggcagtgatgatgaccacattcagtttgtgcagaaaaagccaccacgtgagaatggccataagcagataagtagcagttcaactggatgtctctcttctccaaatgctacagtacaaagccctaagcatgagtggaaaatcgttgcttcagaaaagacttcaaataacacttacttgtgcctggctgtgctggatggtatattctgtgtcatttttcttcatgggagaaacagcccacagagctcaccaacaagtactccaaaactaagtaagagtttaagctttgagatgcaacaagatgagctaatcgaaaagcccatgtctcctatgcagtacgcacgatctggtctgggaacagcagagatgaatggcaaactcatagctgcaggtggctataacagagaggaatgtcttcgaacagtcgaatgctataatccacatacagatcactggtcctttcttgctcccatgagaacaccaagagcccgatttcaaatggctgtactcatgggccagctctatgtggtaggtggatcaaatggccactcagatgacctgagttgtggagagatgtatgattcaaacatagatgactggattcctgttccagaattgagaactaaccgttgtaatgcaggagtgtgtgctctgaatggaaagttatacatcgttggtggctctgatccatatggtcaaaaaggactgaaaaattgtgatgtatttgatcctgtaacaaagttgtggacaagctgtgcccctcttaacattcggagacaccagtctgcagtctgtgagcttggtggttatttgtacataatcggaggtgcagaatcttggaattgtctgaacacagtagaacgatacaatcctgaaaataatacctggactttaattgcacccatgaatgtggctaggcgaggagctggagtggctgttcttaatggaaaactgtttgtatgtggtggctttgatggttctcatgccatcagttgtgtggaaatgtatgatccaactagaaatgaatggaagatgatgggaaatatgacttcaccaaggagcaatgctgggattgcaactgtagggaacaccatttatgcagtgggaggattcgatggcaatgaatttctgaatacggtggaagtctataaccttgagtcaaatgaatggagcccctatacaaagattttccagttttaacaaatttaagaccctctcaaactaacaggcttagtgatgtaattatggttagcagaggtacacttgtgaataaagagggtgggtgggtatagatgttgctaacagcaacacaaagcttttgcatattgcatactattaaacatgctgtacatactttttgggtttatttggaaaggaatgcaaagatgaaggtctgttttgtgtacttttaagactttggttattttactttttggaaaagaataaaccaagaattgattgggcacatcatttcaagaagtcccctctcctccacatttgttttgccaatttgcacattaaatgactcttccctcaaatgtgtactatggggtaaaaggggtagggtttaaagatgtagacagttgggttttttaagggccctttttcaataactggaacactctataacaaaggatacttatttaaatagatgacattgactatttttgtttttattaaaaggaagcttacatgcctaccaatatttaatcttttatgattgcctttttataactttttatattctcagcagagtgctttaccaattgaagtaaaatgtggcaggctggagttattgaagcagagtggcagtcttcagtttgcagagtaggggtctgtcttttaaactctgagtgcaaacttcagagttcttgccttggctgcagttttttccttcaagaatgcgactaacttattgggtgggtacggaagggactagtgattggtggaccgggtaatattgaaggaggggttatattgcggaagttaaggaacagggcatgcaaatcggattaccaggcggtaggcagagaattacatggggtaggaacattcgacagagatggagagggcaggagaggaagacgagtgnn

SEQ ID NO: 21943 - DNA, 1209 bp, Homo sapiens
  misc_feature 1, 2, 3, 4, 1207, 1208, 1209: n = A,T,C or G
nnnnagagtgtcactgagcatttggagagcttgtttaaaattaagaccgccaggccctgtcccaagagcttctgtgattacaagcagttctggttcacgctttggcaaaccactgaactgcggtgagggcagtaaaaagggtaatatgctagctggcatagcagccctacattcattctgtggcagcgtaaaaggtacgcgggggagacttttagtttcgctttcgctaaaggggccccagacccttgcgcggagcgacggaggagagactgtgccagtcccagccgccctaccgccgtgggaacgatggcagatgatcagggctgtattgaagagcagggggttgaggattcagcaaatgaagattcagtggatgctaagccagaccggtcctcgtttgtaccgtccctcttcagtaagaagaagaaaaatgtcaccatgcgatccatcaagaccacccgggaccgagtgcctacatatcagtacaacatgaattttgaaaagctgggcaaatgcatcataataaacaacaagaactttgataaagtgacaggtatgggcgttcgaaacggaacagacaaagatgccgaggcgctcttcaagtgcttccgaagcctgggttttgacgtgattgtctataatgactgctcttgtgccaagatgcaagatctgcttaaaaaaagcttctgaagaggaccatacaaatgccgcctgcttcgcctgcatcctcttaagccatggagaagaaaatgtatttatgggaaagatggtgtcacaccaataaaggatttgacagcccactttaggggggacgatgcaaaaaccttttagagaaacccaaaatcttcttcattcaggcttgccgagggaccgagcttgatgatggcatccaggccgactcggggccatcaatgagcacagaatgcctatcctccgatacaaagatcccaggtggaaggtggattcctcttcggctattccacgggttccaggtattactcgtgggggagccaggagaagctctggcttgcgcaagcccttgctcatctggaggacaggaaagagcgtaatttcaatttccacaggtatggaattcgccgcttgatcacttgaggcacttccgagaaacaatcgggggccgccccagaactcacacctgggtctagaacaagggatagacttggcgataaccgattaagtgaatgcnnn

SEQ ID NO: 21944 - DNA, 1077 bp, Homo sapiens
  misc_feature 994, 1076, 1077: n = A,T,C or G
cgtccgcggacgcgtgggttttttggaaaaggatagaacagagtcacaatacttcagctgataagagagaaatactagctccttttccagtgagagatgaaacttttggaaatacagctctcctcaagaaagctgaaagtggtgagtgccagctaagcacacagaatttgattcaggtggctgcagaagattctcatccattggatccaacttcccagctttccagaaagggttcttttggggatgtggccagccctccccaagatatgctttttccccagggtgctcatcttgttccccaggctagggtacacccttctcaaatggaaatttcggagactgtagagaaagtcattcttccacccagaccggtattgaatgatgtaagtgctgcattacagaagctgtgtggagaagtatggttaagttatccagctggaagggaagtaggtcctggagaagtgaacccagaatttcctgaagcagtacagccagtatgtagccccctaaatcctccaggagtgatatcaccatgggctacgatggacaccatagttccagacaggaaggatttttattcctccaatgtagttcctgataaaactcatgaagttggatcttatttagctgcccaaatgtctccatcagaccagacgcttagctcatttgcttccattgttgctcaatatggcaaaggcctccctcaggaagtggaagaaattgtgagggaaacaattgttcaacccaaatcagagttcctcgaattcagtgctggcttagaaaaactactgaaggaagaaactgaaaccttcccctcaaaatatgaaagtgatacagggaatctttctccatcaaagttaataggtagtacagaggagcccaggcgagccacttctgaatgccatcctgaggaattaaaagaaacagtagaaaaggccgaggctccgttaataactgagagtgcttttgatgctggttttgagaaacttcttanagaaataactgaagctcctccttatcagccccaggtgtcagtgagagaagaaactcacgagaaggagtcctcacagtcagann

SEQ ID NO: 21945 - DNA, 484 bp, Homo sapiens
  misc_feature 241, 246, 248, 484: n = A,T,C or G
acttggcctcgctgatccgttccgtggtcgccctgcacaacctcatcaacaacaagattgccaaccgggatgcagagaagaaagaagggcaggagaaagaagagagcaaaaaggataggaaagaggacaaggagaaagataaagataaggaaaagagtgatgtaaagaaagaggagaaaaaggagaaaaagtaaaacatgtattaaatagcttttttaatttgtaaattaaaatcttacanaccananaaaaaaaataaaaaaaaaaaaaaaggtccacaatggtttattaaaggaatgtatggcccacatcaacctagcaaggattctactggtaaaccttcctatggtcaaaggaaaaacaagcaggagttgagtggctggggtggggtgcaggcaatggagagagggcagaagggtgtaaaagctgaaggggtctagaagcttactcctgagtttcttccttctgtcttcaaatctttacn

SEQ ID NO: 21946 - DNA, 557 bp, Homo sapiens
  misc_feature 1, 2, 3, 555, 556, 557: n = A,T,C or G
nnnccagtaacactgggccatcggtgtttcttgtgatttataaaaccacaattctcccttgccgtggtcgtggccggtgtacacaggtctttcaagttgtctcgtctgattggaggctgaatagtaaatggaatggggggacagtgtgcctggtgtgaggaagacgtaagatccccaatttggaaagcatgcccccctcccttttagtagaagcccatggttgccctttgccaaactggggaggaggcaatgagccttggtggaaggaacctctctgttgatatttaaagaagtgagggctgtgggtattcattggtagaaaatgccaaatttcacttttgaaaccatagtccaagtctctaggttggtagaagggaaaggaaggaagtggtccccagtgattctagatctggttgggaaacttctgcctcatgactctgtcctttgagtcctttggaccgcagcccaaaacataacaatttttattttaacaaccattctttgatccacagactgggtggtcgccgtacccggatggttagtgatactgctacnnn

SEQ ID NO: 21947 - DNA, 1187 bp, Homo sapiens
aatctctatggcatatttttccaatttctgcttttctttttttttcttttctgcttagcacctatggacataattcaacatgatgccctctttcttctggaggggtgtgataactgcttgataataagcactttttcaggcctattgagaatgtggttaatgattctaaacttgatttttcataacttgtaaaatagagctgacagtattatagttctgaaaacagttttgcgttatttgggtatcaaaataaagtttgaaacaattaggatggatttgcaaataacctttcacaaaacatgttgactcagattttgtcatgatccttctgttaggtgcatctcttattccagccctaacagattgggtgacaatatcagggtgctggtggatgtacgcctctttctttccagtgtgctgctatgatggtggctggttacctgtggtgtcttattttctttcactggctatgaatggcttgctcatgacatattttgtatttgatgagaataccatagtgtttgataaatattcagaaatgtatcgctaaaacatatggctattcgaggtattctttttcagaatcatctataggaaagctctagctgctcaggcattcctttccccactgaaattactaacaacataaagtgattatcatggtataactttcagttatctgcctcttcacccggaggatctacaaacagcacacagtgactaagtccctgggctttcaagtgcagagggatactacagactgcatggatgggcaaaatggcgcctttggttatcctcggtggagggctggtgttttcaaagctgtccttcctactgctgcagcttctttgactgttttatctggaagatctcatgttctgaaccccaaggtattctatgacagaatgcaaaggacactgagatgcttaccaatatggctgaattaagctgaagtcaccctccgctttccctccatttccatgcagccatctatacaacctggtatagatgattcattgcatagcctacagaagcaagactatgtgcgggacaagtggcgaaggctcaagaaataacatttttctaattgcttcaatcatcgttatcacagtttcaaccacaccacgggcttttgaccacacaaaacagaaccaggactggacccagtggaacccaagccattcaaa

SEQ ID NO: 21948 - DNA, 318 bp, Homo sapiens
accttcagcagttgtaggagaagaactggcttcagcagaagtggtgacaggtgtgctggtgtcaacaggagttgttgaaagggtgctagcctcagaattggccaacagcgtggtgctgacaagtatatttgttaatggagtgcttctttcaccaggagttgaggttggcatgctgctaccttcagcagttgtaggagatgaactggttccagtggaagtggtcacaagtgtcctggtgtcaacaggagttgttgaaagggtgctagcctcagaactggccactggcatggtgctgacaagtatacttgttaatgaagt

SEQ ID NO: 21949 - DNA, 543 bp, Homo sapiens
  misc_feature 1, 2, 3, 4, 5, 6, 7, 8, 9, 10, 66, 67, 68, 69, 70, 71, 72,73, 74, 75, 76, 77, 78, 79, 80, 81, 82, 83, 84, 85, 86,87, 88, 89, 90, 91, 92, 93, 94, 95, 96, 97, 98, 99, 100,101, 102, 103, 104, 105, 106, 107, 108, 109, 110, 111, 112: n = A,T,C or G
  misc_feature 113, 114, 115, 116, 117, 118, 119, 120, 121, 122, 123, 124,125, 126, 127, 128, 129, 130, 131, 132, 133, 134, 135, 136,137, 138, 139, 140, 141, 142, 143, 144, 145, 146, 147, 148,149, 150, 151, 152, 153, 154, 155, 156, 539, 540, 541: n = A,T,C or G
  misc_feature 542, 543: n = A,T,C or G
nnnnnnnnnncagggttaaggggaagggtggcaagttttttttttaaaataatttaatggcccccnnnnnnnnnnnnnnnnnnnnnnnnnnnnnnnnnnnnnnnnnnnnnnnnnnnnnnnnnnnnnnnnnnnnnnnnnnnnnnnnnnnnnnnnnnnataacctttattttttttaaaagttagtatgtatgtgcaattataggaaattgaaaaacacacaagccaaaggaaaacaaagtcattcacaatcacaagcagttttatagtttgacatattcttctagatcctgtgtgtgtaggcacaacatccaattttatgggaactgagactgttcacagtatggtttattaaaggaatgtatggcccacatcaacctggcaaggattctactggtaaaccttcctatggccaaaggaaaaacaagcaggagttgagtggctggggtggggtgcaggcaatggagagagggcagaagggtgtagaagctgaaggggtctaaaagcttactcctgagtttcttccttttgtcttgaaatcnnnnn

SEQ ID NO: 21950 - DNA, 667 bp, Homo sapiens
  misc_feature 1, 2, 3, 10, 27, 36, 40, 43, 74: n = A,T,C or G
nnnccaaggnctaggtatagaagtgcnaactctggncccncantacataggggttcttttaagctgtagttggnggaataatggtattcaccaataaatacttaataccctggcatttttactttcccaaatttaacctccaagcatattttatggcaaaagcaagacatatgcattgaaattattgggtgatttttccttttcttctttttactagcatcagagggatttaagtatatgatacttagcagtagaatcagtcactatatttataatatttcacagcatttaaaacagtatatacaccaaagactttaggttggcagacaatgattcagttattcatatgttgatctgatataactatgttgttaggaatgtatgagacacatatatttgggtttctgaagacagatatgaactgaagacaattttttcaagttattagcatcttccaggtggtagttggaatactgaaatggattaaatcacctgatcatctgtagacattaaagaaggctaaggacagagtccctgaagtaacaacttttaaggatcatgcagaaaaagaatcagcaaaagaaaaaacaaaccaggaaggtaaggaagatttaggagagtgatgtcagagatggaaagagtttcaaaaaaaaaaaaaaaaaaaagt

SEQ ID NO: 21951 - DNA, 610 bp, Homo sapiens
  misc_feature 608, 609, 610: n = A,T,C or G
acgtgcctctttattccagtaggtggctctaaagtccaattgtttatttttctataacaagaccggagcacaaaattgtgctaaatttgaaaaataacttaatgaggagtattttctgcttagcttctttcctgtcaaaataaaataattttttttcattcaatagtagttgaaccacctgaagctggtttatagaaaacaatgctaaacataaaatgttgctataatatgttataatataacctaagattctttgtatttgtccacagatagaatccagactaacttggcaaaattactcctcattatgtgctgtttctataaaaaaaatagtttatttgcactttgtatcctattaaccctagctgttcacattttcttttccttggaagtacactgagaacagttctttttaaagattaccagatttaaaataataataaaataatgtgtgagtttgcttttttcccctaaactttccagttaaatacttataagtacactgtttcattctggagttctatttccccttagaaaacaatggacttctctcaacagtttgaatcacctctttttttggcatctctcaaaggtttaacttattagcnnn

SEQ ID NO: 21952 - DNA, 194 bp, Homo sapiens
acgcggggagaattgcgctgtccacttgtcgtgcggctctgtgtcgacactgtgcgccaccatggccgtgactgcctgtcagggcttggggttcgtggtttcactgattgggattgcgggcatcattgctgccacctgcatggaccagtggagcacccaagacttgtacctgcccgggcggccgctcgaaaggg

SEQ ID NO: 21953 - DNA, 1144 bp, Homo sapiens
ctttcagccatttctttttatttacagtttgtgttcaatgcaaatcaattccataagaagttactatgaatcaaagcgtaaatacccaaacacaatatacaatccaaaatagagtacgcggggactggagacactgaagaaggcaggggcccttagagtcttggttgccaaacagatttgcagatcaaggagaacccaggagtttcaaagaagcgctagtaaggtctctgagatccttgcactagctacatcctcagggtaggaggaagatggcttccagaagcatgcggctgctcctattgctgagctgcctggccaaaacaggagtcctgggtgatatcatcatgagacccagctgtgctcctggatggttttaccacaagtccaattgctatggttacttcaggaagctgaggaactggtctgatgccgaggtaagaaacttgctgcctgcttggcctggcctttctagagcaaaggaccagccagagccccagatctcatttgattcaggatcaagtgtccttcctgggcactatgaagagaagcccctttggctggtgaaatggagagaagagggttgtgtgttcaactcattcaattctgtaagcattgctgaagcaggtgctgtatgccagaccctagatgggctacaagcacatacggatacataggaaagagcccctaccctcagcaagctcactgtcagtaaaggagacagaaatacatcaatcaaaggaggaagagaagatgaggaattcacagaaaggataatggagtttctgtacaagatttaccagaaagagagtggtgtgtagacatgcctggagcagacaccttggagccgctgacagaaggtgaagcagtccaagaaaatgtggaaacttttccgctgctctacacagtccacaaacctgtccattttatttcgttgaagctttgtctgagagataaccaaatagacagtcaaagtaagttatctcagccacatatggggagtggatgctgctgaattgtgattaattgggggagccatataggtacatttggcatgatctgggcctatgcggtcttacaatccctgtataaaactagacaatgaaaaacagaaaacaaaacaaaaaaaaaaaaaaagggcggccgc

SEQ ID NO: 21954 - DNA, 285 bp, Homo sapiens
  misc_feature 1: n = A,T,C or G
ncattgtggcttcccaagatttcgtccaacatgttttgaagaaccctaaatcccaacaactgattgaatgggtaaaagacacttatagcccagatgaacacctctgggccacccttcagcgtgcacggtggatgcctggctctgttcccaaccaccccaagtacccagagagagaccttggcttcagggcacaagatgcaaactagcttgttacgactatggctttggtttctgagaaacgggaaggcacagtatagtcacaaaacttaggtctggagtcttggt

SEQ ID NO: 21955 - DNA, 437 bp, Homo sapiens
  misc_feature 435, 436, 437: n = A,T,C or G
acgcggggaaagcggagccgggagtttttgctacagttttcgccaccgtgagtcgcagctataatgatgagctgagttcttggagaagatcaataaaaactgctggaggattaagaagggcttcgtgcccaacatgcaggttgaaggtgttttctatgtgaatgatgctctggagaaattgatgtttgaggaattaaggaatgcctgtcatggagcgggccgtgcattgtcccgagcaaaatctcgacgtaatttagatttccaggatgtcttagacaaattggcagatatggaaattgcgatccgtgttgcctcacccaaactggttatggaagaggctcctgagtcctataagaatgtgacagatggtggaaatacctgccatgatgctggaatcaacaagaaagccattatactgagaccaattgctgggannn

SEQ ID NO: 21956 - DNA, 946 bp, Homo sapiens
  misc_feature 944, 945, 946: n = A,T,C or G
agtcgacccacgctgggagcggccgtgacgtcaggcgcccggctgctcctcacttgctctgagacaggtgcggcaagtctactgcgggctggtccgggctcctcaggttcagacccgaccgttatccagtcggttcgtggagaggagaggtgcactttacaggtccccgatgaaccaagagaaccctccaccatatccaggccctggtccaacggccccatacccaccttatccaccacaaccaatgggtccaggacctatggggggaccctacccacctcctcaagggtacccctaccaaggatacccacagtacggctggcagggtggacctcaggagcctcctaaaaccacagtgtatgtggtagaagaccaaagaagagatgagctaggaccatccacctgcctcacagcctgctggacggctctctgttgctgctgtctctgggacatgctcacctgaccagaccagcccagccgtcctgtcctgccagctctgctgccacctctgacaggtgtgcctgcccccatctcttctgattgctgttaacaaatgactagctttgcacagacacctctaccttcagcactatgggattctagattaatgggggttgctactgtttaattcagtgacttgatctttttaatgtccaaaatccatttcttattgatctttaaagatgtgctaaatgacttttttggccaaaggcttagttgtgaaaaatataatttttaaattatacattcaaggtagtggccaaatgtaacacatcaatcatggaatgatttctctgctaacagccgcctgtatgtttcaataaatttgtccaaagctcaaaaaaaaaaaaacaagaaaaaaaaaaaattggtgcgggggcaaaagatacccggggggcacggtggtcccccctttggaaggggaggggccagggggaaaagcnnn

SEQ ID NO: 21957 - DNA, 1606 bp, Homo sapiens
  misc_feature 1605, 1606: n = A,T,C or G
acgcgggggatttttatgggggtgcaaaaaacaaagaacttcaggtcagggagaatgtataaatgtccattgccatcgaggttctgctatttttgagaagctgaagcaactccaaggacacagttcacagaaatttggttctcagccccaaaatactgattgaattggggacaattacaaggactctctggccaaaaacccttgaagaggccccgtgaaggaggcagtgaggagcttttgattgctgacctgtgtcgtaccaccccagaatgtgcactggaggctgtgccagatgcctgggggggaccctcattccccttgctttttttggcttcctggctaacatcctgttattttttcctggaggaaaagtgatagatgacaacgaccacctttcccaagagatctggtttttcggaggaatattaggaagcggtgtcttgatgatcttccctgcgctggtgttcttgggcctgaagaacaatgactgctgtgggtgctgcggcaacgagggctgtgggaagcgatttgcgatgttcacctccacgatatttgctgtggttggattcttgggagctggatactcgtttatcatctcagccatttcaatcaacaagggtcctaaatgcctcatggccaatagtacatggggctaccccttccacgacggggattatctcaatgatgaggccttatggaacaagtgccgagagcctctcaatgtggttccctggaatctgaccctcttctccatcctgctggtcgtaggaggaatccagatggttctctgcgccatccaggtggtcaatggcctcctggggaccctctgtggggactgccagtgttgtggctgctgtgggggagatggacccgtttaaacctccgagatgagctgctcagactctacagcatgacgactacaatttcttttcataaaacttcttctcttcttggaattattaattcctatctgcttcctagctgataaagcttagaaaaggcagttattccttctttccaaccagctttgctcgagttagaattttgttattttcaaataaaaaatagtttggccacttaacaaatttgatttataaatctttcaaattagttcctttttagaatttaccaacaggttcaaagcatacttttcatgatttttttattacaaatgtaaaatgtataaagtcacatgtactgccatactacttctttgtatataaagatgtttatatctttggaagttttacataaatcaaaggaagaaagcacatttaaaatgagaaactaagaccaatttctgtttttaagaggaaaaagaatgattgatgtatcctaagtattgttatttgttgtctttttttgctgccttgcttgagttgcttgtgactgatcttttgaggctgtcatcatggctagggttcttttatgtatgttaaattaaaacctgaattcagaggtaacgtaacaaagattgtgtgtgttttaggaggggggacaaaacgttgaatgaataacaactcatcttttctacaaatgcttcctttgatcaaaccaaaatataataatattatattattaaggacctgcccgggcggccgttcnn

SEQ ID NO: 21958 - DNA, 392 bp, Homo sapiens
  misc_feature 389, 390, 391, 392: n = A,T,C or G
acatttatggtttcatttattttaaatatttaatatttttcttgctatagggaatggcatcttgttaaaactacctgatctatatggttcttgcttatatataggaaagctattgagttttaaatgtttacttgatctggacagtgtcatgaatatatgattaggtctaatagtttttcataagtggccaataattttgttggtaagaaatgatgtcatatataaataaggtgggttttatcctttttctacaatctttatacctcatttatttttcttgtctcatttcattggctggaaccttcatagtgatatttgagtttccttatcttttcctagaaataagaatggctctcttgtttcaccctttaggtatgatgaatactacnnnn

SEQ ID NO: 21959 - DNA, 1120 bp, Homo sapiens
accgaccatagagcaagaatcaagattctgctaactcctgcacagccccgtcctcttcctttctgctagcctggctaaatctgctcattatttcagaggggaaacctagcaaactaagagtgataagggccctactacactggcttttttaggcttagagacagaaactttagcattggcccagtagtggcttctagctctaaatgtttgccccgccatccctttccacagtatccttagcgtggtcgcggccgaggtacgcggggagaagcttggaccgcatcctagccgccgactcacacaaggcaggtgggtgaggaaatccagagttgccatggagaaaattccagtgtcagcattcttgctccttgtggccctctcctacactctggccagagataccacagtcaaacctggagccaaaaaggacacaaaggactctcgacccaaactgccccagaccctctccagaggttggggtgaccaactcatctggactcagacatatgaagaagctctatataaatccaagacaagcaacaaacccttgatgattattcatcacttggatgagtgcccacacagtcaagctttaaagaaagtgtttgctgaaaataaagaaatccagaaattggcagagcagtttgtcctcctcaatctggtttatgaaacaactgacaaacacctttctcctgatggccagtatgtccccaggattatgtttgttgacccatctctgacagttagagccgatatcactggaagatattcaaatcgtctctatgcttacgaacctgcagatacagctctgttgcttgacaacatgaagaaagctctcaagttgctgaagactgaattgtaaagaaaaaaaaatctccaagcccttctgtctgtcaggccttgagacttgaaaccagaagaagtgtgagaagactggctagtgtggaagcatagtgaacacactgattaggttatggttaatgtacaacaactattttagaaaaacacgtttcgaatggtcccgtgtcctgtgtgaccttgtttccctatggccggttttaaaaacaaattgtggggggtcggtccggaaaaaaaaaaaaaattggggggcgaaataaaa

SEQ ID NO: 21960 - DNA, 327 bp, Homo sapiens
  misc_feature 1, 323, 324, 325, 326, 327: n = A,T,C or G
nactctgtctttaaatgaatgaatgaatacagttgtgtcttcttattgtttagagttgaagtatatgtagtccttgttactccatcataactgaaagtgtaattttgctttcattcttaaatgatatatttggagcatataatctcatttgaaagctctttttagcacttgcaatgtgtatttctactgtgttctggcatttattattttttatgatgtcagtagtcattttttttctatacgttaatgtgtcatttttctctgccttctttcaagattatttctgtatttaaactttctagtagtaatataatgaaaatggnnnnn

SEQ ID NO: 21961 - DNA, 1811 bp, Homo sapiens
ccgcctcgcgtccggcggtgctggtttttcgctcgtcgactgcggctcttcctcgggcagcggaagcggcgcggcggtcggagaagtggcctataacttcggcgttgggtgaaagaaaatggcccgaaccaagcagactgctcgtaagtccaccggtgggaaagccccccgcagacagctggccacgaaagccggcaggaccgtggcgcttcgagagattcgtcgttatcagaagtcgaccgagctgctcattcgcaagctgcccttccagaggttggtgagggagatcgcgcaggatttcacaaccgacctgaggtttagagcgcagccatcggtgcgctgcaggaggctagcgaagcgtacctggtgggtctgttcgaagataccaacctgtgtgccatccacgctaagagagtcaccatcatgcccaaagacatccagttggctcgccggatacggggagagagagcttaagtgaaggcagtttttatggcgttttgtagtaaattctgtaaaatactttggtttaatttgtgactttttttgtaagaaattgtttataatatgttgcatttgtacttaagtcattccatctttcactcaggatgaatgcgaaaagtgactgttcacagacctcagtgatgtgagcactgttgctcatgagtgacaagttgctaatatgcagaagggatgggtgatacttcttgcttctcatgatgcatgtttctgtatgttaatgacttgttgggtagctattaaggtactagagttgataaatgtgtacagggtccttttgcaataaaactggttatgacttgatccaagtgtttaacaattggggctgttaagtctgaccatacatcactgtgatagaatgtgggctttttcaagggtgaagatacaagtcttaaccacagtgtaacttacagtttcctttaaaaaaaaaaaaaaagtaaacctggcagctatagaatacactatgtgcatttataatagctattttatatattgtagtatcaacatttttaaattaaatgttttacattcacaagtggtggggagtcttgtcattaaggtgtgtgtaatttacagtccagttggttttcttctgactgcacttgttctcatagtagtaaaatgctatgcgcatttataccttgcataagtcctcattctaccacatgttaaccctctagctgataatgcaaacactaactgggggattttatttataagggctctagaaaaaacgagttattcacaccagcatcatcttaactaacattctgaactagttagtgcagcttttcattgtgttgtgtggttggtctcataactaggttgagtttttctcctctgctgaggaaacagtaccgaagttctttttcttgtggcatttgtattataaaaacttggtgtgggggaggagcacaaaactccagcccactgaacctctgccaattaagatggtgttgggttaggttacatctggttactgtcctgggaaaatcatttttatagagatggccttccaagtggttttaaaatttactgaagtttttaggtcaattatgtatgttgactaaatttacaaataaacttgtttatccaaaaaaaaaaaaaaaaaaaaaaaaaaaaaaaaaaaaaaaaaaaaaaaaaaaaaaaaaaaaaaccttgtgggccgcttgggcccattcgattttaaattggaccaagtttttccttgcggccgaatttcgggttaattgggccatttggccttttggggggccgttttacatttaatgggccgtggtttaacaacgtatgga

SEQ ID NO: 21962 - DNA, 1591 bp, Homo sapiens
cggtcgttcgttgggcggtgctggtttttcgctcgtcgactgcggctcttcctcgggcagcggaagcggcgcggcggtcggagaagtggcctaaaacttcggcgttgggtgaaagaaaatggcccgaaccaagcagactgctcgtaagtccaccggtgggaaagccccccgcttcgagagattcgtcgttatcagaagtcgaccgagctgctcatccggaagctgcccttccagaggttggtgagggagatcgcgcaggatttcaaaaccgacctgaggtttcagagcgcagccatcggtgcgctgcaggaggctagcgaagcgtacctggtgggtctgttcgaagataccaacctgtgtgccatccacgctaagagagtcaccatcatgcccaaagacatccagttggctcgccggatacggggagagagagcttaagtgaaggcagtttttatggcgttttgtagtaaattctgtaaaatactttggtttaatttgtgactttttttgtaagaaattgtttataatatgttgcatttgtacttaagtcattccatctttcactcaggatgaatgcgaaaagtgactgttcacagacctcagtgatgtgagcactgttgctcaggagtgacaagttgctaatatgcagaagggatgggtgatacttcttgcttctcatgatgcatgtttctgtatgttaatgacttgttgggtagctattaaggtactagagttgataaatgtgtacagggtccttttgcaataaaactggttatgacttgatccaagtgtttaacaattggggctgttaagtctgaccatacatcactgtgatagaatgtgggctttttcaagggtgaagatacaagtcttaaccacagtgtaacttacagtttcctttaaaaaaaaaaaaaagtaaacctggcagctatagaatacactatgtgcatttataatagctattttatatattgtagtatcaacatttttaaattaaatgttttacattcacaagtggtggggagtcttgtcattaaggtgtgtgtaatttagagtccagttggttttcttctgactgcacttgttctcatagtagtaaaatgctatgcgcatttataccttgcataagtcctcattctaccacatgttaaccctctagctgataatgcaaacactaactgggggattttatttataagggctctagaaaaaacgagttattcacaccagcatcatcttaactaacattctgaactagttagtgcagcttttcattgtgttgtgtggttggtctcataactaggttgagtttttctcctctgctgaggaaacagtaccgaagttctttttcttgtggcatttgtattataaaaacttggtgtgggggaggagcacaaaactccagcccactgaacctctgccaattaagatggtgttgggttaggttacatctggttactgtcctgggaaaatcatttttatagagatggccttccaagtggttttaaaatttactgaagtttttaggtcaattatgtatgttgactaaatttacaaataaacttgtttatccaaaaaaaaaaaaaaaaaa

SEQ ID NO: 21963 - DNA, 291 bp, Homo sapiens
actttagtttgccttaacctactttttgttgtatttgtttaatttcttctactggattataattcccctgagtagacagtatttgtctaactatcttagagtgctgagaagagtgtgtggctcagactatgggtgtaattcagttgacacatggtgcatgcctataaggatattctgagagtgacaaagttaagacagacatcagacgtaattagtaaacacacatattacacagttccatattatatatgaatgtaaaacattcagataaggaatatgaggcaagtatgt

SEQ ID NO: 21964 - DNA, 2191 bp, Homo sapiens
  misc_feature 1: n = A,T,C or G
ngccagttagaccttgggactaactggcaagacacacacagctgcagatgtacttagagtctcatctggttcttaaggagccctaggagcccttgagaaaacaaatgtcaaatgtattagagccactttgggtggagaaattcgagctagacttcgttaaatgcaaggggagcagactgagacttcccccttcccccaactctctgggttgcattccatttagtctttcctagaggcagggaaatgggctaggtggcctttggagcacactgctggcttggtaaatttctgatcttacagatgaaataagaggccttaaaaagtataaggcctttggctcctaagcactaatctgggcaggttagaaagctactcagggctttgggcgaaagccccatatgcccattcagtaagtatataaaaccaggattggcttattgccctcaccattcacgtgcaaatttatcccttcccttcaacattggaaggggcctaaagtgggtgaccccagatttgcgtttcagttctgaagaaaacatgcaagaaaaagaaaatggcgggaggtgctcgcaagctggttcagcccattgccctggatccctcaggacggcctgtgttccccatcggactagggggtctaacagtatatagcctgggggaggtgagtgagaccagcgatatatagcagaggcagaatcagggcaaatacgggaatggggttgagccttccctccctgttcccattagcagcagcctcttgctgatccataccaaccccagcgtatctccagtccctgcaaaaccaggtcagtgttgtctgctacacagcctactctctgtctttgtgtgattggtcactctttgcagccccaaagtggttctaaaggctaccacaggaaactggacttctaaattcttcagtgacctcaatcccaggttgggggaatgttttttatagatcatcaccgaccgacctggctttcatgatgagagtgccatctaccccgtgggctattgcagtactcgaatatatgccagcatgaagtgcccagaccagaagtgtctatatacctgtcagatcaaggatggtggtgtgcagcctcagtttgaaattgttcctgaagatgacccccagaatgccattgtcagctcttctgcagatgcttgtcatgcagaactgctcaggactataagcactactatggggaaactaatgcctaacctgcttccagctggagctgacttttttggattttctcatccagccatccacaacctgatccagagctgtccaggagctcgaaaatgcatcaattaccagtgggtgaaatttgatgtgtgcaaacctggagatgggcagctacctgaggggctgccggagaatgatgcagctatgagctttgaagcctttcagagacagatctttgatgaagatcagaatgatccccttctgccaggatccttggacctcccagagcttcagcctgcagcctttgtgtcttcttaccagcccatgtacctgacacatgaacccttggtagatactcacctgcagcacttgaagtctccatcacagggtagcccaattcagtcttcagattgaacaagaagggatcagatgccacatcgtttttgtcgtgattaatttaacttaaactaaaattttgggtatatgaaagaaggcagcaattcagaagtaaagaagatactaacgtatttcatcatggaaggtcctgtggtgatggttttccctgggaaaaccttcagctgctttatttttagtaataaatttctcttgtcaattctgtttactttcatcttgtaatcgggatgtaatcttttttgcttagctctgcctgaggtaaagtaaacttcagcctcttataaacaagagtgatagagagctgcaggctgctacaacaaataccatagacaggttggtttataaataacatgaatttatttctcacagttctggatgctgggaagtccaagttcaaggagcgcagattcaatgtctggtgagggcccacttcctagttcttagacagctgtcttcctgcagtgtcctcacgtggtagaagaggaaggcagctctccggggtcccttttataagatcactaagccggttcatgagaggtctgctctcatgacctaatcacctcccaaaggccccacctcccaatacca

SEQ ID NO: 21965 - DNA, 1407 bp, Homo sapiens
agggagtcgcccacgcgtccggctggggctgctttctcccctcccttcttgactctctgttcacagaactcaggctgcctccagccagcctttgcccgctagactcactggccctgagcacttgaaggtgcagcaagtcactgagaatgagcactttcttctcggacacagcatggatctgcctggctgtccccacagtactatgtgggacagtattttgcaaatacaagaagagctcagggcagctgtggagctggatggtctgcctggcaggcctctgtgcagtctgcctgctcatcctgtcccctttttggggcttgatcctcttctcggtgtcatgcttcctcatgtatacttacttatctggccaagaattgttacctgtggatcagaaggcagtcctggtgacaggtggtgattgcgggcttggccatgctttgtgcaagtatctggatgagctgggcttcacggtatttgccggagttttgaatgaaaatggcccaggagctgaggaattgcgaagaacctgctctccgcgcctctcggtgctccaaatggacatcacgaaggccagtgcagataaaagatgcttacagcaaggttgcagcaatgctgcaggacagaggactgtgggctgtgatcaacaatgctggggtgcttggctttccaactgatggggagcttcttcttatgactgactacaaacaatgcatggccgtgaacttctttggaactgtggaggtcacaaagacgtttttgcctcttcttagaaaatccaaagggaggctggtgaatgtcagcagcatgggaggaggggccccaatggaaaggctggcatcttatggctcatcaaaggcggctgtgaccatgttctcatcagttatgagactggagctttccaagtggggaattaaagttgcttccatccaacctggaggcttcctaacaaatatcgcaggcaccagtgacaagtgggaaaagctggagaaggacattctggaccacctccccgctgaggtacaggaagactacggccaggactacatcttagcacagcggaatttcctcctattgatcaactcgttagccagcaaggacttctctccggtgctgcgggacatccagcatgctatcttggcgaagagcccttttgcctattacacgccagggaaaggcgcttacttgtggatctgccttgctcactatttgcctattggcatatatgattactttgctaaaagacattttggccaagacaagcccatgcccagagctctaagaatgcctaactacaagaaaaaggccacctaggcaatggaagccctcaaagaagtcggaatgtcatagtcttgaaatgaaagggaaactgggaaactgggtttctcattaaagttgtttcccactctg

SEQ ID NO: 21966 - DNA, 640 bp, Homo sapiens
  misc_feature 1, 2, 3, 4, 165, 171, 181, 452, 639, 640: n = A,T,C or G
nnnnctcaaaggccctcagtgagataaattagatttggcatctcctgtcctgggccagggatctctctacaagagcccctgcccctctgttggaggcacagttttagaataaggaggaggagggaaagagaaaatgtaaaggagggaggaaattttttccctttntttttnccccagggcncgcaccatttctgtcactcacatggacccaagataaaagaatggccaaaccctcacaacccctgatgtttgaagagttccaagttgaagggaaacaaagaagtgtttgatggtgccagagaggggctgctctccagaaagctaaaatttaatttcttttttcctctgagttctgtacttcaaccagcctacaagctggcacttgctaacaaatcagaaatatgacaattaatgattaaagactgtgattgccacctaagaaaaagctaaangctattataaataacgtacttgggctggaaggccaagacagcaccagaaactagcaacatttattctagtgctcaaaatgtccgcgacaaattggccttctgcatatttatgaagacctttctcagaaaggaagaccagttgtgtaccttggccgcgaccacgctaaggcgcgaattccagcacacnn

SEQ ID NO: 21967 - DNA, 666 bp, Homo sapiens
  misc_feature 1, 2, 3, 4, 5, 6, 7, 8, 9: n = A,T,C or G
nnnnnnnnngagtctttcttaaaaaacaaacaaataaaaaactcttcaacaaatcctaaagaccaggaaataaacatctgctgagttttctgctcagtgtccattcatgatttttctggtaacaatactgccagttacttagggggcaaccccctgactctagagccatgtagcttagtggagtgaaccccacccccagcttcagaagtgggaaagtttacacagtccaagctcactcagacactgcaagcccttcccatagatgcaggttcagaatcaaggtcacagacttgtagggaaagataagatctctctggacttgaataagcctctgtgcagtaaaaccaactgggaggcaagcagagcccagaactggaaggagatggttctaatacatgggcccctggatgcaaccatgcctgatgcctgatcattctggacttttcagttatggatcaatacattcattttgctcaggccagtttgaattgggtttgaggagagaggaatttagactcaagcagtcctcacctcagcaagattggcctccatagttgtccatccacgaatcaagggaggatgtgggaaaaattgaaggtgttacaggataaaagtaaatgaaggcctcgtgagtttcatgctcctgacatgacgagtgggcaaagt

SEQ ID NO: 21968 - DNA, 1461 bp, Homo sapiens
cgccttgtttctctgtgccagatcttcagtgcccctttcatacagggatttttttctcatagagtaattatatgaacagtttttatgacctccttttggtctgaaatacttttgaacagaatttcttttttttaaaaaaaaaacagagatggggtcttactatgttgcccaggctggtgtcgaactcctgggctcaagcgatccttctgccttggcctcccgaagtgctgggattgcaggcataagctaccatgctgggcctgaacataatttcaagaggaggatttataaaaccattttctgtaatcaaatgattggtgtcattttcccatttgccaatgtagtctcacttaaaaaaaaaaaaaagaaaaagaaatggataatttcatctactgcctttacttggggttaatgtgattcttaaacaccttcatcatggaactctcagagtggggtccgttttggtttcctggtggtgggttttgaaagataagggaaagcacattttgagcatgtctgggtaccatggtgcggatgcttgggaaccagaactgtttcagaggaatctgaagtctgattttagttttcagagacacagcttgttgtaaaacatgagaagacatgatttctaggactcaagcagcaagccaggattctaggttggctgctgtgtcatctttgaagtcaagacaaagctgggctcgaccttcaagggtcctcgttttgataatacttcagaatagggaactcatgtgaatactactatgtagaaataaaacctagaccttgagcgaacatctgtatattggttgaaaacgatagtggtaaccattgatcccccttcatttgatgtttggaaaattccagtaattatcatttttgcaacgaatatggataccacatagtactttggtgttacctgcttttgaaaaataaagtctttggttcacccggtgaactatttatgagttcttttggtgtgaagaaagggctcatgttgcatttccagccattgctacaaagaacctttatttgttcagtaacggtagaaaatccttcccgattaaaaacttcagacttgctgaatatcctgcaatgtcaagatgaccgatgttgagttgggtggatttgctaacgagtcagatttgaacatgaggctattggaacccaataggcgtcattgatggcggcaagccatagctttcaagctgtttaataaagatggcaccagaagaaaaacaacaacagccaaaaaccattttgttgggcccgcatggcgcccttaaagagagtgtttgaacacattccgttgggcgccggcccattaggttgtggaacgtgtgccaggccggtcccagagaaaacccgggcctgacactgggtctgggttttcccccataaaaaagcccggggaaccggggtttgtgacacccgatgggtccggggccctccgggtcttac

SEQ ID NO: 21969 - DNA, 551 bp, Homo sapiens
  misc_feature 1, 2: n = A,T,C or G
nnaatttcagcactttgggaggccaaggcaggcggatcacttgaggttctgtttggattctgcaaagcagactcgtcagaaagttgctgtgaactggaccaacttcagcctcaagaaaaccactcctagcacagctcagtgaggccctgcccaggctgagctgcttcagggcatcctgaggccctgactgccagctgaaggcgtataattttgccctccgtgtgccccacctacccgtccaagaccctctgtgctccccaccatcctggaccaaccaaaagctgaacggatgccacactgtgctggggccccttgacctcagcagagccgcttcctggtgctacgcagcctccacactcagagcccgtggactgggctggcctaagggccagggctgatggtaccaactcattctgaaaactggtaaacaaaggaaacaaaaccccaagtaattgtcttctttcctgggcaaatggttgatgagggaaaggttttatcttgttttatcttgttttcaagacaaggtcttgctctatcacccagattggagt

SEQ ID NO: 21970 - DNA, 296 bp, Homo sapiens
acgcgggtaaggaaggaattcctcctgatcagcagagactgatctttgctggcaagcagctggaagatggacgtaccgaagtatagagggctgctgtatttgcagagctaagtcctccagttctcgattcactgacagtaaacgctatgaaaaggacttccagagctgttttggattgcatgagactcgttcaggagacatctgcaatgcctgtgtcctgcttgtgaaaagatggaagaagttgccagcaggatcaaaaaaaaactggaaccatgtggtagatgcaagggctggac

SEQ ID NO: 21971 - DNA, 417 bp, Homo sapiens
  misc_feature 416, 417: n = A,T,C or G
caggacgcggggagacagcagaaggatcactgggctggaagctctaacaggcattgccagcctagctacctgcagtttgaggcaagggcagggtcacttaccctgctgtctgaatgtctcctgggacaacaggaggctgcactcactggctgagttcagacagaagagggatcatcggactggaagctctggcaggtatggctagcctggttacccgtagtgagaatggagagggccacctgcccagctacacaaatgtttcccaggacaacaggaggctgtgtccactgacagttcagaccgaagtggaaccactggaccggaagctctagcaagtgttgcccacctggctactagtgagccttgaaaccagcgaaacaataatcaaagagcagttctgtcaaagaaaacaacann

SEQ ID NO: 21972 - DNA, 950 bp, Homo sapiens
  misc_feature 1, 2, 3, 4, 5, 881, 950: n = A,T,C or G
nnnnnagcatcctttagtctagggctagatttccactctacccaatgtcccatgaattatgaggctttccactctggctggtgggaacaggcactattcctagaccactattccaagcttcctaaatctcggccagaacaaattcattaatttatttagaaagatttattaagcaccttcatgttaatagcactaaggactgttccctctcatccttttaagtggttcttttcccagcattatgtatcttcttcatacgctggagccaatcaggagttagctgaatacctgaagggaccttctgcagatctccagaattctctcagtaaaacctctctcatctccagtactctgcctgtgaaccctagccaccttgtgaactctggctatcttggccttttttaattctctccttaactcagggagacctctgatttctactagggttccctctgtctgcactgcagtctggaaattctccctggggagtaaagtggagcaatcagagggtcagttgaattgtttcctgattctcagagatcactggcctttgttgcttcatattcaatatcttttaaagtgttatttaatttacttttctagttgttttaaaccccctaaaaatgtaaattcaatccttgttactccatcttggctgaatccacaagtcctctgtcttccattttctttttaaaagattaaaaaatgagaacaaatgtcttttatatttactatttcttgcactcttcattttttgtgtacatttgagtttctatctagcatcattttccttcagtctaaggaaaccctttaaataatttctggtagttctagtcttctggcaatgaattagcttgtttgtatgaaaaatggtcttattntatctctacttttaaagaatgtttctactggatatagaactctaggttggcatttaaaaaaatcagcan

SEQ ID NO: 21973 - DNA, 2110 bp, Homo sapiens
agggcgtcgacccacgcgtccgtttttttttttttttacatgttcaagttttattacaaagtatgatgggcagaaaatacggtacttcttatacaggaggctgaaacagaatgaaagggtgaaaattaggtttaatttacttaggaaacaagaaatagaaagtcatagctataacactccactttcaggtgcccatgaagtagccttcaatggagattccccatagttgtttcacagcacagtgttaaaattttattacaagccctgtgtacaatcagtcctgtgaaaatatttataaaagaaaaatattacagtacagttctgcaaggggcagcttcctctacacctgaccgtggatgccacaaaacctataatatagagggaaagtttaaatatataacaagaatggaagttcagacatactaggctaaaggacacagaaatggatcagttagagcttaacatttcagagcaagaaatctccattttctacatagaggtttatacaatcatgctacaaattcactctgggtggggtggggaaggaaggtcactgacaagaggggtagtaaaatacacaggaaccaaagcaagtgagtcagactcaactaaatcgattcaaagcttcagctcaacaattttcataacacatggtataccacaatcaacccaaggtgagaacatttcttttaaatagtagatatcacatgttcataatcactgggttgtcccaaaggtgggtgcctataaactttccagctgttacatagactgtcaacatctttcttcttgagtttaaactttctttagcttatttgtttctcgttggatataccagtccaagcctctttgggaaggcacctgcatgtttccatattttaaaaatgacatccagaaagtagcctgagaggacctggcccatcccatgtggccacacatttgactttgaccattagcagcagtgacactgtgagagggggagaaggtgcaggtgggtgaagtgggcaagggtctgcaacacgagacgctctcaggagctggcccagccagggcctggcccagggttcacagtgactttgctctgctccgccctcttccctgggaaaaccaatctaagtatcaagcatgatcttccttcttcgtcctggagtacacacagtaaagggaaaagtctgctttgaggcttctacttcaatggtctcccctaccccaagccaggaatgaaaggggctgccatattctcaaagtggggaaggcagagggacagtactgggctgccctcccacgtgtggtaaaccctgcagctgctacatgtcttcacagcccaggaattcaaggcccaggtggcagcaggaagaaacagtggaaaagcaaggggaagagaaaagagaaaaaggagggggaaagtctgcataactgtcataacctctgcttctcctgctctgtaacaaacccacaaccaggaagagtcatggtctggaacaatcatgggaccccaaacgcctgtaggttttttaccaccaaacatcacccatggctgctctaagctgtcattttgttcccacagttacctagcatcacggatgcccaatttatggcccaggaaggctgacccaggctaagggcagtctcactccacagccatgcaatggacagtctgaatgtttccctaccccagaccttcactgacctctactatttcctcctctgatataaagaaaacactttaattttctcctgcatcctacatctcctcctaaaattttggccctaattgtcatcaaaaccttgtaggattctgaattttttgtttcttcctgaatcttagccagttctctcagagccaatcctggatttataaggaattttcacctattttttttttttttattattttttgagacggagtcttgctctgtcgcccaggctggagtgcagtggcacgatcttggctcactgcaagctccacctcccaggttcacgccattctcctgcctcagcctcccaagtagctaggactacaggtacccgccaccacccccggctaatttttttttgtatttttagtagagatggggtttcaccatgttagccaggatggtctcgcgga

SEQ ID NO: 21974 - DNA, 978 bp, Homo sapiens
  misc_feature 1, 978: n = A,T,C or G
ncacgaacatggtttactgcacctcagcttcctgggcacaaggtgattctcccacctcagcctcccgagtagctgggagtataggtgtgtgccaccacgtccagctaatttttttatttccttgtggagatggggtctcatgaccttgtccaggatgatctcaaactcctgggctcaagcaatcctgtgttggcctcctaaactgctgagattattgcaagtgcctccttgcccagcctgggtgacaaagcgagaccctgtctcaaaaaaaacaaggactctacagatagatagacatcatatatcatattagtttgaatcctggctgttagctgttagacttgggcaaataatttaacctcaactttccctatctataaaatgggaattaaaatatttgcaccttatagggttattgtgaggattaaataggaacattgtataaagcacttaaaacagtacctgggacatactaagtaatataattgttaactcttactagcatttctgtcccttttatttcctaaatatctctcatgcccatctcctaaatatctctttcctaaatatctctcatgcttttggcttaagacctcttttcctccttatctattgactggactgcggaaatgcctgctaatcgttattttgtgttccttcctttagcagccaatttatacgcgcttaggtggcgcccgggctacaaagctgttgagaatgggcttgataatgagaagctgccggtatctgcggagcacgcgtatggggccctcaatctgcgggttaaaggttcacggaagggggcaatacgggtggcccacgacgtgggacgaacctcggatcaatcttgcggagtgctccaaagttccgggtccgctactagaagcgccgccagcgcgggaggacaacgtttatcaacgtcagccggccacagaactcctaggacctcttgattcatcagtcctcacgtctggcgcn

SEQ ID NO: 21975 - DNA, 544 bp, Homo sapiens
actgggaatactctgctgtggcctattttttggcattgttggactgaagattctcttctccaaattccagtggaaaatccaggcggaactggactggagaagaaagcacggacaggcagaattgagagacgcccggaaacacgcagtggaggtgactctggatccagagacggctcacccgaagctctgcgtttctgatctgaaaactgtaaccgagagaaaagctccccaggaggtgcctcactctgagaagagatttacaaggaagagtgtggtggcttctcagagtttccaagcaggaaacattactgggaggtggacggaggacacaataaaaggtggcgcgtgggggtgtgccgggatgatgtggacaggaggaaggagtacgcgggcaaattagaactcaggattaagaaactcactcaaaaccgcacaactacaaggaaactgaacaacctgctcccgaatgactaccggttaaataacgaaatgaaggcagaaataaagatgttctttgaaaccagtgagaacaaagatacaatgt

SEQ ID NO: 21976 - DNA, 928 bp, Homo sapiens
  misc_feature 1, 2, 3, 4, 5, 6, 7, 8, 9, 904, 905, 906, 907, 908, 909,910, 911, 912, 913, 914, 915, 916, 917, 918, 919, 920, 921,922, 923, 924, 925, 926, 927, 928: n = A,T,C or G
nnnnnnnnnggcaggatggaaatctagatgagcctgtccggagcagaacacccctgattagccaggcccaccgccatccacatctgctcggcaaagaaggaaggcagcttgttccagaccttggtgagcagctgcagactgcctgcctagaacagcctccttactccagcctggcagggaaggaaggaacctgacttgcttcgcaggatctggaagctcagccggcagagctgagagccgcagttgcatcctggagcctgatgctagaagcagcttccgtctttgggttcttgctgcctcggcctctgctctgttcagtttgctgttgtgtttttctcccccatgttggggtggtggggtacagggaaataaaatgctttctcccaggcccctaatccttccccatgcctccatcagcctcaaagctgctgacagtcatgaactgcaccttccagccctgcccataagctactcaaagcaaattcaaattctcttctggccaggaggaagggcagatgctccctccttcctcaagcctccctggctcattgatccattttgagggcatttgggggtcaaagttgagaccagattgcttcagtttgtataaaattagcatttcttatcacaccaaggccacacctgttctctggcctcacaaaccagtgaggatgtaaaggtttgttgaggtggaggaacagaagtgaaatgagcaatctgctccatttagaagtcagtcgcttcggctgttcattccactaatatttatctagtacctattctgtgccaagcattgtctctacctcagtttgccacaaatatgaaaaaaaaaaaattcttggaactgtgaggcttcaatgtgttgtggaccaatatacaaataaaccaatggaaaagaacacannnnnnnnnnnnnnnnnnnnnnnnn

SEQ ID NO: 21977 - DNA, 312 bp, Homo sapiens
  misc_feature 1, 2, 3: n = A,T,C or G
nnncggggtctcgttccccggccatcttagcggctgctgttggttgggggccgtcccgctcctaaggcaggaagatggtggccgcaaagaagacgaaaaagtcgctggagtcgatcaactctaggctccaactcgttatgaaaagtgggaagtactccttcctgtataagacaatagaggtattctgcgaatacttcaaggagctggaggaggagagcatccgggacaactttgtcatcgtctacgagttgctggacgagctcatggactttggcttcccgcagaccaccgacagcaagatcctgcaggagt

SEQ ID NO: 21978 - DNA, 444 bp, Homo sapiens
  misc_feature 1, 2, 3, 444: n = A,T,C or G
nnnatagctgtttcctgtgtgattaggaacggccagtagcatggcgcctcggtcttccttgtgatgagaaaaaaacacaattcggcttatcgtggtcgcggccgaggtacaaatgacacaattagagagaaaagagtgacaaaaaacaaagagatgaatactgattataacttattcccacaacagaaggctacttatttctacaattatcaatcaaagcctgacaattcagtgattagatgaagtgaaagccaaattcccttttacatgtggtactttttaaaagctgcaatatgtgatggaaaatagctgtggtcaattttgttatccatatttcaaactcaattttagatacaatggtggctttatattttaagtatatagagctactcaaggagttgaatctccccttttctcattaacacaatttttctaagttgatan

SEQ ID NO: 21979 - DNA, 2125 bp, Homo sapiens
  misc_feature 2077, 2120, 2121, 2122, 2123, 2124, 2125: n = A,T,C or G
acgcgggggctttctggaagggcaaggactctatatatacagagggagcttgctagcggggatattggagcagcaagaggctgggaagccatcacttaccttgcactgagaaagaagacaaaggccagtatgcacagctttcctccactgctgctgctgctgttctggggtgtggtgtctcacagcttcccagcgactctagaaacacaagagcaagatgtggacttagtccagaaatacctggaaaaatactacaacctgaagaatgatgggaggcaagttgaaaagcggagaaatagtggcccagtggttgaaaaattgaagcaaatgcaggaattctttgggctgaaagtgactgggaaaccagatgctgaaaccctgaaggtgatgaagcagcccagatgtggagtgcctgatgtggctcagtttgtcctcactgaggggaaccctcgctgggagcaaacacatctgacctacaggattgaaaattacacgccagatttgccaagagcagatgtggaccatgccattgagaaagccttccaactctggagtaatgtcacacctctgacattcaccaaggtctctgagggtcaagcagacatcatgatatcttttgtcaggggagatcatcgggacaactctccttttgatggacctggaggaaatcttgctcatgcttttcaaccaggcccaggtattggaggggatgctcattttgatgaagatgaaaggtggaccaacaatttcagagagtacaacttacatcgtgttgcggctcatgaactcggccattctcttggactctcccattctactgatatcggggctttgatgtaccctagctacaccttcagtggtgatgttcagctagctcaggatgacattgatggcatccaagccatatatggacgttcccaaaatcctgtccagcccatcggcccacaaaccccaaaagcgtgtgacagtaagctaacctttgatgctataactacgattcggggagaagtgatgttctttaaagacagattctacatgcgcacaaatcccttctacccggaagttgagctcaatttcatttctgttttctggccacaactgccaaatgggcttgaagctgcttacgaatttgccgacagagatgaagtccggtttttcaaagggaataagtactgggctgttcagggacagaatgtgctacacggataccccaaggacatctacagctcctttggcttccctagaactgtgaagcatatcgatgctgctctttctgaggaaaacactggaaaaacctacttctttgttgctaacaaatactggaggtatgatgaatataaacgatctatggatccaggttatcccaaaatgatagcacatgactttcctggaattggccacaaagttgatgcagttttcatgaaagatggatttttctatttctttcatggaacaagacaatacaaatttgatcctaaaacgaagagaattttgactctccagaaagctaatagctggttcaactgcaggaaaaattgaacattactaatttgaatggaaaacacatggtgtgagtccaaagaaggtgttttcctgaagaactgtctattttctcagtcatttttaacctctagagtcactgatacacagaatataatcttatttatacctcagtttgcatatttttttactatttagaatgtagccctttttgtactgatataatttagttccacaaatggtgggtacaaaaagtcaagtttgtggcttatggattcatataggccagagttgcaaagatcttttccagagtatgcaactctgacgttgatcccagagagcagcttcagtgacaaacatatcctttcaagacagaaagagacaggagacatgagtctttgccggaggaaaagcagctcaagaacacatgtgcagtcactggtgtcaccctggataggcaagggataactcttctaacacaaaataagtgttttatgtttggaataaagtcaaccttgtttctactgttttaaaaaaaaaaaaaaaaaaaaaaaaaaaaaaactggagggggggccncgtaccccatttcgccctatagtgagtcgttttccaattaacnnnnnn

SEQ ID NO: 21980 - DNA, 359 bp, Homo sapiens
  misc_feature 357, 358, 359: n = A,T,C or G
acgcgggtgacttaaagctgagagtggagcaggcactaggggaaaacctggcatgcagatccccacccccagagggatatgaagcttgtggtaggtgccctgatggtaaccagagcaacagtaaggctcaaacccagtccagcttctaatgaaattaactcgattcttgcactaatagcttagcaggagggaaaaacctgtaggtctattagtaggaattacccatgctgaaatacaaagagaaagaagagtgaaaacaggacaaaataaacagaattaagtatccaagagctatgcaccattatcaaatggtataacatatttataattggacttccaaaaagagaagcaggaacnnn

SEQ ID NO: 21981 - DNA, 1577 bp, Homo sapiens
  misc_feature 1575, 1576, 1577: n = A,T,C or G
tccgcttgattttagattctggaaaatttcgagttttaggatgcatcttgtctgaattgaaacagaagggtgatagagttgtgttatttagccaatttaccatgatgctggatatcttagaggttctattaaaacatcatcagcataggtacctcagattagatggaaagactcagatttctgaaaggattcatctaattgatgagtttaataccgatatggatatctttgtgtttctgctatcaacaaaagctggtggattaggaataaatctgacttcagcaaatgttgttatacttcacgatattgactgtaatccttataatgacaaacaagcagaagatagatgccatagagtaggccagactaagtgatgaagggagtatgccagcagatatagccacattactaaaaacatcaatgggcctgtgaaataagaactgtgaactctcaattgatgaggaaatatcaacttgggtgcactcaaggacatttacattatgatgaccatggggtttatgaacatttataactttttataatttccatattacatttctcatagtatggacaactttttgccactaactgaattctccaaatactcacacgtgaaatttcaacagttttctgaatggggattagttggtgattgtttgtaacaaatatgctaatgctttagaaatgtcagtatttttgtaattatttctacctccaaatatatatatattgtctttcactggataatgtgtgtagatttttacatgtgccttatttgacaatgcttatgtcttgtttttgcttgtctcatttgaagttcttttttattatgttaaagaatgcagctgtatagattatatagctttcattttattgctatttgaagcagatgttcaccaatgtcagcaagaactcaacctgaatttaaaggtggcattccatatactaacatcccccaggtcctctcaagtacttctgctgaaacaaatttatttggctaggcactaagttgttttccagtgaatagtaactaaagaagcccctaccttgctccatggattaattccttctgttcattttccaactgcactaattgtgcatattactctgcctaatcttgtgcatgttttcattgatttccctctcccggcttttgcttctcttgaaactgttgcccagtcacttctgctccaattctcttcctctctaaatagtagtttattactgccacatctccatgcatcagcaaaatgttggtgacatttttctagcctggcagaacagattacttaaagctatttcacttcaaagcagactgaatgtgacttcatctaaaggcagcattaggtactgcatggaaataggtcattaacttgaaactcttatcaaaatatattttaccagtttccagaatttccagtacaggaccgcctgaagagagagccattgttcaattccaattcagtgtgagtgacaaagtgaaatttagaagtgaagttgtctatttgatatttaactctttattaaatctttctttaaatgcggagcaattgcgggaaaaaaaaccttggtaannn

SEQ ID NO: 21982 - DNA, 303 bp, Homo sapiens
actgttcaatacatttttgttgagcaaattatagctcagaataaagaagtgatatattctaaattgtattgaaataaaagcacatgacaaaatagctaagtatttttatttattttttccccctgtgatagaacaagtaagaagtttgcgacagagcactattgccaagcgttcaaatgcagcaccattaagtaacacaaaaaaaagcatctgggaagactgtatctactgctaaagcaggagtgaaacaaccagaaaggagtcaggttaaagaagaagtatgtatgtcactgaaacctgagt

SEQ ID NO: 21983 - DNA, 683 bp, Homo sapiens
  misc_feature 586, 683: n = A,T,C or G
acggcccagtttgcttggctctacaaggcccaaaacggtttggacttttccacttaaggaagacatttctgatggtacccaccaccactgtatgatgctcatgagctctggcatgccatgaagggagtaggcactgatgagaattgcctcattgaaatactagcttcaagaacaaatggagaaattttccagatgcgagaagcctactgcttgcaatacagcaataacctccaagaggacatttattcagagacctcgggacacttcagagatactctcatgaacttggtccagagagaatctgtcaagatattttacaaaaagaaatggagttttcttctaaagggaggtgaaatttggagctggggaccagagaggaaggatatacggaccctgcgatggctgctcaggatgcaatggtcctatgggaagcctgtcagcagaagacggtggagcacaaaaccatgctgcaaatgatcctgtgcaacaagagctaccagcagctgcggctggttttccaggaatttcaaaatatttctgggcaagatatggtagatgccattaatgaatgttatgatggatactntcaggagctgctggttgcaattgttctctgtgttcgaaacaaaccagcctattttgcttatagattatatagtgcaattcatgactttggtttccan

SEQ ID NO: 21984 - DNA, 697 bp, Homo sapiens
  misc_feature 685, 686, 687, 688, 689, 690, 691, 692, 693, 694, 695, 696,697: n = A,T,C or G
acgcggggacagaagggacgacagctgcttgctggggagaggcggagccctgagctcctgcagaacctgaagggaagaatatttctcagccctccgttctcaagacagatgagtgctttagaaagaggactctgcagcggcgaggaggatggaatgacaggcaaagcacgcaggaccaggagatggcttcgctccctcaatcactcatccaaagacgtttaatgagcacctattgtgtgtcaggcattgtaccgggcaatggggatatcgtagtcagtaataagtgaggagagatgagttcatttgtgagaggctctgaccagtggaatcagaggaagggagttcccctgggtgggccaggttcaaagacattttggaagtagaatctgcagaacatgatgatcttttggaaacagggcagggacgtgaatgagcacgtaatgtccccatgggtttgtctttccgaaggtttaaaatcctcaagaataaggaacataggcatgtgtcgtaacggtctccacagtgggggagtattatgttagtgcacctgcatgttaactctgctcatgaaggggccacgtcttcaccaccacaaagcctcaagcatgcatatctggtccctcctaccccctccctattgaggtgcaataaaggcccatgtttctcctagtatgggaacagaacnnnnnnnnnnnnn

SEQ ID NO: 21985 - DNA, 425 bp, Homo sapiens
  misc_feature 1, 2: n = A,T,C or G
nnagataccatggaagagcttgctgatttggtgggggtcaggcccaatctgctgtctctggctttcactgaccccaagctggcattacacttattactgggaccctgcactccaatccactatcgtgtacagtggcgccatcttggctcactgcaacctctgcctcccgggttcaaaccatccccctgcctcagcctcctgagtagctgggattacaggtgcctgccactctacccagctaatttctgtatttttagtagagacggggtttcaccgtgttgaccaggctgatctcgaactcctgacctcgtgatatgctcgcctcggcctcccaaagtgctgggattacaggcatgagatatattgaccaaaaatatagatcaatagacctgtatagaaatgtaatttaaacactgagcatatgt

SEQ ID NO: 21986 - DNA, 388 bp, Homo sapiens
  misc_feature 1, 2, 3, 4, 5, 6, 7, 8, 9, 10, 11, 387, 388: n = A,T,C or G
nnnnnnnnnnnacctgcccgggcggccgcccgggcaggtacattttgcccttagctttttgtttcctagcttgtcttttttcttctgcttcctacttttcaggtttaaatttatcttttttcttctaaaagtatgtttttatcttctaatttccctatcttctctattcttttcttcgccttcccgtacgcactggagctgcactgcataattctaagtcttccaccctgtttaaagatttcaagaagatggcaaaatcatcttacatttttcagacttcatcttcaaaactgccattaccaaacgattccgccacacatccttttagctacagggctgatacatccttctgtggcttggagatgaatagaatgatacagtgtgtgnn

SEQ ID NO: 21987 - DNA, 4639 bp, Homo sapiens
  misc_feature 4427, 4428, 4429, 4430, 4431, 4432, 4433, 4434, 4435, 4436,4437, 4438, 4439, 4440, 4441, 4442, 4443, 4444, 4445, 4446,4447, 4448, 4449, 4450, 4451, 4452, 4453, 4454, 4455, 4456,4457: n = A,T,C or G
cccacgcgtccggagcgggctcggttttgggccgcggcgggagcgggagtcgccgccactcgagtgcgcaggcgcctggcgattaccggtctcaccatggagcggaaagtgcttgcgctccaggcccgaaagaaaaggaccaaggccaagaaggacaaagcccaaaggaaatctgaaactcagcaccgaggctctgctccccactctgagagtgatctaccagagcaggaagaggagattctgggatctgatgatgatgagcaagaagatcctaatgattattgtaaaggaggttatcatcttgtgaaaattggagatctattcaatgggagataccatgtgatccgaaagttaggctggggacacttttcaacagtatggttatcatgggatattcaggggaagaaatttgtggcaatgaaagtagttaaaagtgctgaacattacactgaaacagcactagatgaaatccggttgctgaagtcagttcgcaattcagaccctaatgatccaaatagagaaatggttgttcaactactagatgactttaaaatatcaggagttaatggaacacatatctgcatggtatttgaagttttggggcatcatctgctcaagtggatcatcaaatccaattatcaggggcttccactgccttgtgtcaaaaaaattattcagcaagtgttacagggtcttgattatttacataccaagtgccgtatcatccacactgacattaaaccagagaacatcttattgtcagtgaatgagcagtacattcggaggctggctgcagaagcaacagaatggcagcgatctggagctcctccgccttccggatctgcagtcagtactgctccccagcctaaaccagctgacaaaatgtcaaagaataagaagaagaaattgaagaagaagcagaagcgccaggcagaattactagagaagcgaatgcaggaaattgaggaaatggagaaagagtcgggccctgggcaaaaaagaccaaacaagcaagaagaatcagagagtcctgttgaaagacccttgaaagagaacccacctaataaaatgacccaagaaaaacttgaagagtcaagtaccattggccaggatcaaacgcttatggaacgtgatacagagggtggtgcagcagaaattaattgcaatggagtgattgaagtcattaattatactcagaacagtaataatgaaacattgagacataaagaggatctacataatgctaatgactgtgatgtccaaaatttgaatcaggaatctagtttcctaagctcccaaaatggagacagcagcacatctcaagaaacagactcttgtacacctataacatctgaggtgtcagacaccatggtgtgccagtcttcctcaactgtaggtcagtcattcagtgaacaacacattagccaacttcaagaaagcattcgggcagagataccctgtgaagatgaacaagagcaagaacataacggaccactggacaacaaaggaaaatccacggctggaaattttcttgttaatccccttgagccaaaaaatgcagaaaagctcaaggtgaagattgctgaccttggaaatgcttgttgggtgcacaaacatttcactgaagatattcaaacaaggcaatatcgttccttggaagttctaatcggatctggctataatacccctgctgacatttggagcacggcatgcatggcctttgaactggccacaggtgactatttgtttgaacctcattcaggggaagagtacactcgagatgaagatcacattgcattgatcatagaacttctggggaaggtgcctcgcaagctcattgtggcaggaaaatattccaaggaatttttcaccaaaaaaggtgacctgaaacatatcacgaagctgaaaccttggggcctttttgaggttctagtggagaagtatgagtggtctcaggaagaggcagctggcttcacagatttcttactgcccatgttggagctgatccctgagaagagagccactgccgccgagtgtctccggcacccttggcttaactcctaagcccctgcccagcaccacagcagagatcacacactgaccctccgcccttccccttcaagcattttcctcttcccttttcagggtgaagctcttccttcaagagtttctagatcttgttttttttttaatccaacatgttcatttgggtttgcttacttgaccctgtggagatccccacagccattgggcatcctaggtgaatttggccttggttgggctctgccaaagactaatggactaaaatgtgaaacagcctcttgccctgtacctttccttcccattaggacatcctttaaattataagcatcctttttgaaaagagctatgaaggtgtatgagcccatccttttattcattgactctaagagtcaaattttctagtgcatatcctattgccagcataaggatgaggagggggaaagggtcttaattctatgtacagcagagacattaaacttgctgtgtccgggctgcatcatcttcctggactgtttctgttgttctctgtgttcacattttttcctgcaacttttaagctactgtcttttttaaatagctatatgaacaccaaatttgggtaccattttatcactgttcaaagcactgtcaaattcctttcatcctttaatagttaagatctttgaatcttcagtctgatttttaatgtaagcaaaaacagaaccattgaatagtaatttcttgagaacctcaggtgttctataaacagtcctttcctgtatgtcttctattaccctaagaccagagttattttggttggttgttttgttttattttttgtttttgtatccatggctggcactttactcattgcacttgagtttattgccccataactaaaggatcaggatgatggtagaacggagatctgggtttcagagctttcccatttaagaaaaatagatcttgagattctgattcttttccaaacagtcccctgctttcatgtacagctttttctttaccttacccaaaattctggccttgaagcagttttcctctatggctttgcctttctgattttctcagaggctcgagtctttaatataaccccaaatgaaagaaccaaggggaggggtgggatggcacttttttttgttggtcttgttttgttttgttttttggttggttggttattttttaagattagccattctctgctgctatttccctacataatgtcaatttttaaccataattttgacatgattgagatgtacttgaggcttttttgttttaattgagaaaagactttgcaatttttttttaggatgagcctctcctagacttgacctagaatattacatattcctccagtaatactgaagagcaaaagagaggcaggattggggtcacagccgcttcttcagcatggaccaagtgggccttggggattgcagcgttctcgaagtggctgtaggactcgaatttacagaaagccacagaggtgcaacttgaggctctgctagcaagccaccagtgaggctattgggtaaccacctttctatacaggagattggaatctactttgtcatttatccaccacagtgacaaaggaaaagtggtgccgttatgcaatccatttaactcataaacatattactctgagtaactggccagccattcatcggatccttcattgggtactcctgaaatcagacatgttcctgtagaaagaattttaagttaggctttctatgcacctatcaagaatcaagagaatagattgtatcaaacaacggcagggaaatccttcagcaattctaatccactttgggttttcagctgtttttacatctaaagcaatagactagaactgaattatcttctacatagtaaaatcacaattgtggaattacaggaattctggtgatattaaggtgaaataacaaaacacaaaaggccctattttaacagttgatgtgacagtaagttttaatagaacctgtaacttcattttggaaatgcttctccaccaaataagggctttttcccctatttaaggagccagatggattgaaagatgtggaaataggcagctgtagatcttgatcttccaggtaccccatgtacctttattgagcttaattataatactgtcaaattgccacgatctcactaaaggatttctatttgctgtcagttaaaaataaagccctaaatacatttttattctttctactgagggcattgtctgttttctttgtaaatgccgtacgcggggagacacactctgccccaaccatcctgaagctacaggtgctccctcctggaatctccaatggatttcagtcgcagaagcttccacagaagcctgagctcctccttgcaggcccctgtagtcnnnnnnnnnnnnnnnnnnnnnnnnnnnnnnnccccccccaaacggggaaaaatttttttttgaaaatttttttccccccccagggggaaaaaaaaaccctaaatttcaaaaatgggggggggggggttttttcaaaaaaaaagggaggggtttttttttaaaaaattgggcctttttccttaaaaattaaaatttgccccccccgggggggcc

SEQ ID NO: 21988 - DNA, 1066 bp, Homo sapiens
  misc_feature 1, 2, 1057, 1058, 1059, 1060, 1061, 1062, 1063, 1064, 1065,1066: n = A,T,C or G
nnacgcctccgcttcccttctgaaaaaagaaagccaactttcctttcaaatacacaccccaacccgccccggcatacacagaaatggggactgcgagcagaagcaacatcgctcgccatctgcaaaccaatctcattctattttgtgtcggtgctgtgggcgcctgtactctctctgtcacacaaccgtggtacctagaagtggactacactcatgaggccgtcaccataaagtgtaccttctccgcaaccggatgcccttctgagcaaccaacatgcctgtggtttcgctacggtgctcaccagcctgagaacctgtgcttggacgggtgcaaaagtgaggcagacaagttcacagtgagggaggccctcaaagaaaaccaagtttccctcactgtaaacagagtgacttcaaatgacagtgcaatttacatctgtggaatagcattccccagtgtgccggaagcgagagctaaacagacaggaggagggaccacactggtggtaagagaaattaagctgctcagcaaggaactgcggagcttcctgacagctcttgtatcactgctctctgtctatgtgaccggtgtgtgcgtggccttcatactcctctccaaatcaaaatccaaccctctaagaaacaaagaaataaaagaagactcacaaaagaagaagagtgctcggcgtatttttcaggaaattgctcaagaactataccataagagacatgtggaaacaaatcagcaatctgagaaagataacaacacttatgaaaacagaagagtactttccaactatgaaaggccatagaaacgttttaattttcaatgaagtcactgaaaatccaactccaggagctatggcagtgttaatgaacatatatcatcaggtcttaaaaaaaaataaaggtaaactgaaaagacaactggctacaaagaaggatgccagaatgtaaggaaactataactaatagtcattaccaaaatactaaaacccaacaaaatgcaactgaaaaataccttccaaatttgccaagaaaaaaaattctattttaaacnnnnnnnnnn

SEQ ID NO: 21989 - DNA, 1802 bp, Homo sapiens
  misc_feature 1, 2, 3, 1802: n = A,T,C or G
nnngatatagagtattcgccgctcttttctgtgtatacaccgccacttgttttttgtgcaccacgttttttccttggtgcaaattccaatccaccttgctcttagtagaaatccgcttccgtttttccgggccataaatttaatcacctgccccaaagtcctctcgttaggttaaaaacacaatgcgtcctggggagccaattgcccggcacgtcttattactgagaaagtgcaagaatgctgatcatcttatgcagcatactaaaggatgatttactctttacaaaatagagctttaagtatcaacctgatggaagttagaaaattaaaaacatttaagtagaatcatctctctctctatttttgagatccctgcagcaaaaagcctcccaaatcaactttcaaagttctgccattaaggaatgttggttctcttgtaaaattcagagatctctttaaaatagtaaaactatatactacaggaaagatccctaatttttatttcttattggtataaaatcaaattcttaagactccaaaatattgttacctccaaagaattaagtaaaaaaagatcgccatagtaggaaaagtctagaattgtaaactgccaaatataaaagcatggtaagtcatcaacctatctcattttcttacctgtcagaaagccttcctaacttacaggcacacagggccgctgctgaatgcaggcctctgcctccacaaagccacgagctctggctcgcccctttctgtccatggccattagcacctccaccaggtaggtcaggagagatgaaatcgacaacagtccgtttgctgcttatgaaataaactcttagaaaatgtgccagaggaagagggggcatgaatggctagaaaagcaatgatgagggtacttgggattttttttctggccaccccttcactggcacagaaaatgaagtgataagctataaatatgtgcatagaggagtttggactttattgtttgtaaaatgttaaatttgctcttggacatttttttttttcttttcacaggggggcagtcgggattataatacactgtagcagttggctggggaaaagtctatcaaattccatgaccaattggacttttctcccacctgtaatataaataaaatatgtactgtttcatactgaattttttcaatgcattggggttcaacataaaaggcacaaataaataaaaatatcattaaataaacggaaattacaatttcaagtttcatgtggagttgtatctcactgtttggttactttttccaatttaatttgacagacttagtaatagcacccaactgtttaactgaggtagatccacattgtaaagaaagctgggtcccctccattttatctctaaatttatgatacttttataaaaacaaaaatccatttaaatcatatgcagaagcgatgacaggtggtactacctgaagaaagcttagaacatgagcaggtttgcaaataagacctacgcccaaatcacactctccatcagccacacagaaatctcagactggaggggaaaaaaaaaagaaacatgaaaaaaaaaaaaaccctgaaaaagtcgcaagacttttagaacaggtctttttgactgtcacagaaatgcacaatggtccattttcatcaagctatggccatagccaagctagacaagagagagagagagagacacagagacagagactgagagaggtgtatcactgaatgcttccctttaactccagaaaaaaataacttgaattatgatacagcggacgcgtgggtcgactccn

SEQ ID NO: 21990 - DNA, 1627 bp, Homo sapiens
  misc_feature 1, 2, 3, 1595, 1626, 1627: n = A,T,C or G
nnnatgtcatgatataaacagtattgagataaaatttataacttctcttccctttaataaattgtcaaaggataaagtttcctgtttgaaaatatatttaactggtattgtgctttcctcatatcacagattggtaaagaatcattttaagtccaagactcttattttacatattctgcaattaaaggtcctatgaggctacctgccgactgctgacatgtagtgtgtggtaaatgtgagtgtttcacagcctggagtgaacaggggtcttctctgagaattgaggttgcaaggctggctaactcagctttgccttcacgagccctagaggccagccgaaggatgtctgcaggtcagggagacaggaccaggtaacccagctgtcactgaagattatatagagtttgagaatgttggaatatttgaaaatgctcccccaaaaaagctgctgatgagttctggaaatgtcaggagattaatctatacggacactgctgaagaaaaaggtagaagaataaaagatccagtacttcttcctgggtaagcagttatgaccagagatggaaccggcaactctttggccagaaagctgtatccaaaagacagagaagatgagaaacagggagggcaaaggcgaaaaagcaattggacatgatagctagatttgtttcaggaaaacatcctgctttccaaggatttagatgaatgtttttgttcactggtgactcaggtaacacgtcttcaagaagccatagggaggttgagggagggaagtcaagaagggaggttgaggactgcacttttgatttacttctgacttcacgagtcactttctgccaaagaaatctctccttttgcttctagcaccgactagatttccttcagctgatgattgactcccagaattcgaaagaaactgagtcccacaaagctctgtctgatctggagctcgcagcccagtcaataatcttcatttttgctggctatgaaaccaccagcagtgttctttccttcactttatatgaactggccactcaccctgatgtccagcagaaactgcaaaaggagattgatgcagttttgcccaataaggcaccacctacctatgatgccgtggtacagatggagtaccttgacatggtggtgaatgaaacactcagattattcccagttgctattagacttgagaggacttgcaagaaagatgttgaaatcaatggggtattcattcccaaagggtcaatggtggtgattccaacttatgctcttcaccatgacccaaagtactggacagagcctgaggagttccgccctgaaaggtacaagtctccagggaaatggagctcaccctgacccaggctggttcaagcatattctgcctctcttaatctacatgacaatcgtgtggttgtacaatcatttgcttgtaagtctttttatcacaaaaaagtgataattatcaaactgtacaaaccacagactagaaaaaacgaaactacattcattcacagtcccagcacaagacaaagataatcaattatgtccctgtgggcatttttctacgcctatataagattcttaaacaggaaactatncacttgcctatattactataaatatacatann

SEQ ID NO: 21991 - DNA, 665 bp, Homo sapiens
  misc_feature 628, 664, 665: n = A,T,C or G
gtccgctcatgatctgtccacctcagcctcccaaagtgctgggattacaggcgtgagccactgcgcccagcagcttcatttaattgaattgtacaaaaacagttacgttcagttgcaggtttttattttatttggtcaaaatactgaaatatgcttactttatccggacttaacaccgtcaaaaaatgttaatcacttttacgtgcagcacccacagcacatgaaaactggcagttaattgattagaaggagctgggtggcaggttgtggatctggactgtctggcttcaaaccttgctctgcatagatttggtgaccgaaacgttttgtgacctctgtgccttgctttccgtacctgtaaaatgggagtaataataaaatctcccacataaggctgttgtagggtgaaaccaaataaagaatgcagcaagtaaacagtaagtatgagtcattattaccatgcaggtgtgtaagtgcttcccatatttccgagttattttccaaaaattccactgtaaacttgtttattggaaattaaaatgcattttgccacagaaaccgttataaatggagtattgacaagcccatagaagtcttcatttccgctggaatgtagtagttgtacaanattatatttttgaaatggttcttggtgatgtgggcnn

SEQ ID NO: 21992 - DNA, 1732 bp, Homo sapiens
cgcgtccggcaggaatgggctgagagtggtgtttgctttctccaccagaagggcacactttcatctaatttggggtatcactgagctgaagacaaagagaagggggagaaaacctagcagaccaccatgtgctatgggaagtgtgcacgatgcatcggacattctctggtggggctcgccctcctgtgcatcgcggctaatattttgctttactttcccaatggggaaacaaagtatgcctccgaaaaccacctcagccgcttcgtgtggttcttttctggcatcgtaggaggtggcctgctgatgctcctgccagcatttgtcttcattgggctggaacaggatgactgctgtggctgctgtggccatgaaaactgtggcaaacgatgtgcgatgctttcttctgtattggctgctctcattggaattgcaggatctggctactgtgtcattgtggcagcccttggcttagcagaaggaccactatgtcttgattccctcggccagtggaactacacctttgccagcactgagggccagtaccttctggatacctccacatggtccgagtgcactgaacccaagcacattgtggaatggaatgtatctctgttttctatcctcttggctcttggtggaattgaattcatcttgtgtcttattcaagtaataaatggagtgcttggaggcatatgtggcttttgctgctctcaccaacagcaatatgactgctaaaagaaccaacccaggacagagccacaatcttcctctatttcattgtaatttatatatttcacttgtattcatttgtaaaactttgtattagtgtaacatactccccacagtctacttttacaaacgcctgtaaagactggcatcttcacaggatgtcagtgtttaaatttagtaaacttcttttttgtttgtttatttgtttttgtttttttttaaggaatgaggaaacaaaccaccctctgggggtagtttacagactgagtgacagtactcagtatatctgagataaactctataatgttttggataaaaataacattccaatcactattgtatatatgtgcatgtattttttaaattaaagatgtctagttgctttttataagaccaagaaggagaaaatccgacaacctggaaagatttttgttttcactgcttgtatgatgtttcccattcatacacctataaatctctaacaagaggccctttgaactgccttgtgttctgtgagaaacaaatatttacttagagtggaaggactgattgagaatgttccaatccaaatgaatgcatcacaacttacaatgctgctcattgttgtgagtactatgagattcaaatttttctaacatatggaaagccttttgtcctccaaagatgagtactagggatcatgtgtttaaaaaaagaaaggctacgatgactgggcaagaagaaagatgggaaactgaataaagcagttgatcagcatcattggaacatggggacgagtgacggcaggaggaccacgaggaaataccctcaaaactaacttgtttacaacaaaataaagtattcactaccaaaaaaaaaaaaaaaataccacaaaagacactgttgcggcgccctggcccgaaaaggtttaacacccttgttggggcccggccccgtgttttgacccgtggcaagcgttcccaggaaaccggcgcgacggggggtcccccaaaaacccgggacc

SEQ ID NO: 21993 - DNA, 7677 bp, Homo sapiens
  misc_feature 1, 2, 3, 7675, 7676, 7677: n = A,T,C or G
nnnacaccccgggcaggtggagcgctcgcggctgctcgcggcgagcccgggagtgatggcgaggcccctgcgggcggccagcgcctgaggcgccccgccccgccccgccccgcgcggccctccccgcccggccctgccctgccctgctccctgccggcggctgcgggcgcttcctagtccgctcgggcggccgcccaggcgaggtgcggcctccgcacaggccggggggcgtaggcgcgcggggcccgccatggctgcgtcggagctctacacaaagtttgccagggtttggatacctgatccagaggaagtctggaagtcagcagagctgctcaaagattataagccaggagataaagtcctcctgcttcacctcgaggaaggaaaggatttggaataccatctagatccaaagaccaaggagctgcctcacttacgaaatcctgacatacttgttggtgaaaatgacctcacagccctcagctatcttcatgagcctgctgtgctccataatctcagagtccgctttattgattccaaacttatttatacgtattgtggtatagtcctagtagctataaatccctatgaacagctgcctatttatggagaagatattattaatgcatacagtggtcagaacatgggtgatatggatccacatatctttgcagtagctgaagaagcttacaagcaaatggccagagatgaacgaaatcagtccatcatcgtaagtggagagtctggggcaggaaaaacagtctcagctaagtatgccatgcgatactttgcaactgtgagtggttctgccagtgaggccaatgtggaggaaaaggtcttgacctccaaccccatcatggagtccattggaaatgctaaaacaaccaggaatgataatagcagccgttttgggaagtatattgagattggttttgataagagatatcgaatcattggtgccaatatgagaacttatcttttagagaaatccagagtggtattccaggcagaagaggagagaaactatcatatcttctatcagctttgtgcctcagcaaagttacctgaatttaaaatgctacgattaggaaatgcagataactttaattacacaaaacaaggaggcagtcctgtgattgaaggagtggatgatgcaaaggagatggcacatactaggcaggcctgcactttgctaggaattagtgaatctcatcaaatgggaattttccgaatacttgctggcatccttcacttaggcaatgttggatttacatcccgagatgcagacagctgcacaatacctcccaagcatgaacctctctgcatcttctgtgacctcatgggtgtggactatgaggagatgtgtcactggctctgccatcggaaactggctactgccacagagacatacatcaagcccatctccaagctgcaggccacgaatgcccgcgatgctttggccaagcacatctatgccaagctctttaactggattgtagataatgtcaatcaggctctccattctgctgtcaaacagcactcttttattggtgtgctagacatttacggatttgaaacatttgagataaatagttttgaacagttttgcataaattatgcaaatgaaaaactacagcaacaattcaatatgcatgtcttcaaattggagcaagaagaatatatgaaggaacaaattccatggacactcatagatttttatgataatcagccttgtattaatcttatagaatcaaaactaggcattctagatttactggatgaggaatgcaagatgcctaaaggcacagatgacacctgggcccaaaaattgtacaacacacatttgaacaaatgtgcactctttgaaaagcctcgtctatcaaacaaagctttcatcatccaacattttgctgacaaagtggaataccagtgtgaaggatttctcgaaaagaataaagacaccgtttttgaagaacaaattaaagttcttaaatcaagcaagtttaagatgctaccagaactatttcaagatgatgagaaggccatcagtccaacttcagccacctcctcagggcgcacacccctcacacgaactcctgcaaagcccaccaaaggcagaccaggccaaatggccaaagagcacaagaaaacagtggggcatcagttcagaaactccctgcacctgcttatggagacactcaatgccactacccctcactatgtgcgctgtatcaagcctaatgacttcaagttcccattcacgtttgatgagaagagggcagtgcagcagctgagagcatgtggtgtcctggaaaccatccgaatcagtgcggccggtttcccctcacggtggacttaccaagaatttttcagccgctaccgtgtcctaatgaagcagaaagatgtgctgagtgacagaaagcaaacatgcaagaatgtgttagagaaactgatactggacaaggacaaataccagtttggtaagacaaagatctttttccgtgccggtcaagtggcctatctagaaaaattgagagctgacaaactgagagctgcctgcatccggatccagaagaccatccgagggtggctgctgagaaagaagtacctacgcatgcggaaggcagccatcaccatgcagagatacgtgcggggctaccaggcccgatgctatgctaagtttctgcgcagaaccaaggcagcaaccatcattcaaaagtactggcgcatgtatgtggtccgcaggaggtacaagattagacgagctgccactattgttcttcagtcttacttgcgaggcttcttggccagaaataggtatcgcaagatactccgtgggcacaaagcagtcatcattcagaagcgagtccggggctggctggcccgcacacactacaagaggagcatgcatgccatcatctaccttcagtgctgcttcaggcggatgatggccaagcgtgagctaaagaagctcaaaatcgaggctcgctcagtggagcgctataagaagctgcgcatcggcatggagaacaagatcatgcagctgcagcgcaaagttgatgagcagaacaaagactacaaatgccttgtggagaaactaaccaatctggaaggaatatacaactctgagactgagaaactacgaagtgacttagaacgtcttcaactaagtgaagaggaagcgaaagttgccactgggcgggtccttagtctgcaggaagaaattgccaagctccggaaagacctggagcaaactcgttcagagaaaaaatgcattgaggaacatgcagatcgatacaaacaagaaacagagcagctggtatcaaatctgaaggaagaaaatactttgctgaagcaagaaaaagaagccctcaatcaccgcatcgtgcagcaggctaaggagatgacagaaactatggagaagaagttagtagaagaaacgaaacaactggaactcgaccttaatgatgaaaggctgagatatcagaaccttctgaatgagttcagtcgcctggaagaaagatatgatgacctcaaggaagagatgacccttatggtgcatgtgcctaagcctggacacaagagaacagactccacccacagcagcaacgagtctgaatatatctttagctctgaaattgcagaaatggaagacattccatcaaggacagaggaaccaagtgagaagaaggtacctctggacatgtcattgttccttaagctccagaagcgggtcacagagctggagcaggagaagcaggtgatgcaggatgagctggaccgcaaggaggagcaggtgctccgcagcaaggccaaggaagaagaaagaccacaaattagaggtgcagaactggaatatgagtcactcaagcgtcaagaactagaatcagaaaacaaaaaactgaagaatgagctaaatgagttgcgcaaggccctcagtgagaaaagtgccccagaggtgaccgccccaggtgcacctgcctaccgtgtcctcatggagcagctgacctctgtgagcgaggagcttgatgtccgcaaggaggaagtcctcatcttaaggtctcaactggtgagccagaaagaggccatccaacccaaggatgacaagaatacaatgacagattccacaatacttttggaagatgtacaaaaaatgaaagataaaggtgaaatagcacaagcatacattggtttgaaagaaacaaatagatcatctgctctggattaccatgagttgaatgaggatggagagctgtggctggtttatgaagggttaaaacaagccaataggctcctggaatcccagctgcagtcacagaagaggagccatgagaatgaggccgaggccctccgtggggagatccagagcctgaaggaggagaacaaccgacagcagcagctgctggcccagaacctgcagctgcccccagaggcccgcattgaggccagcctgcagcacgagatcacccggctgaccaacgaaaacttggatttgatggaacaacttgaaaaacaggataagacggtccgtaaactgaaaaaacaactgaaagtatttgccaaaaaaattggcgaactagaagtgggccagatggagaacatatccccaggacagatcattgatgaacccatccgaccagtcaacattcccaggaaagaaaaggatttccaagggatgctggaatacaagaaggaggatgagcaaaaacttgttaagaacctgattctggaactgaagccacgtggtgtagcagtcaatttgattccaggattaccggcatatatcctgttcatgtgtgttcgacatgctgactacctgaatgatgatcagaaagtaaggtcgttgctaacatcaacaattaacagcatcaaaaaagtattgaagaaaagaggtgatgattttgaaaccgtctccttctggctctctaacacatgccgatttttgcactgcttgaaacagtacagtggagaagagggctttatgaagcacaacacatctcgccagaatgaacactgcctcaccaattttgacctggctgagtatcggcaggtgctgagtgacttggccattcagatctaccagcagctcgtgcgggtgttagagaacatccttcagccaatgattgtctcaggcatgctggaacatgaaacgattcagggcgtgtctggggtgaagcccacagggttgagaaagcgaacctccagtatcgccgatgagggcacctacacactggactccatcctccggcagctcaactccttccactcggtcatgtgtcagcatggcatggaccctgaactgatcaagcaggtggtcaagcagatgttctacatcataggggccatcaccctgaacaaccttctcctgcggaaggacatgtgctcctggagtaaaggcatgcagatcaggtacaatgtcagtcaactggaagaatggctgcgtgacaagaatctgatgaatagtggggctaaagaaaccctggaacctctcattcaggctgctcaacttttgcaagtgaaaaagaaaacagatgatgatgcagaagccatttgttctatgtgcaatgctttaactactgcccagattgtgaaagtgttgaatttgtatactccagttaatgagtttgaagaaagagtctctgtgtcgttcattcgtactatacagatgcgtttacgagacaggaaagactctccccagctgctcatggatgctaaacacatctttcctgtcacctttcctttcaacccatcttccctcgcactagaaaccatccagattccagccagcctcggcctgggcttcatttcacgggtctgaaagtgatgtccaggcaaaaattgacaatacatttcttgcccgaaataagaacccattatttccagtgagttactgaaaatacatttttaaagagaaagtactgattatctcccaaatgagaagtcattaactggaaatctccctagaatactttcatcactttggaaacaaagataggctctttcgtgctgtgttatctttatagcaacactcatccttaaccaactaggtaccgtgagtttacatacaggagaatgatggaaggaagggaggaaggaaaggaggagaaaaatgtgtcttcagctggcagcatttattttaaatccttagcactgagtttgaatggtataaaaagtataacttccatagatgagctgttgttaggaaggcaccaaagaacctcctctgcactaaacaggagaatggaaagaaaagtctccattgagtacatatcatgtcagtttagtaatcaattatgttgatattgttaaactggttcaaagaaataaactggcaatatgtaaagtaattcctcatttgtgtcactatgatatagagatattaaaggaatgttggtttgctaaatagtatagatgtccatttgtactatagtttactgagcattttaaattgctgctacatactgtcttcttaaaatgtaagtgatattaggcactacaataagtttctcttgtcaattctgtttacaattcaatcagatcacagttttaactggattatatgcaaatacctacagattcacctgcacaagtagcagacactggaaagtcatgtagtaatatgacaaaatgcttgacatttaggggtaggattagacaaagtggctattgttgatgtcattatttattcaggatgtattacattgatgtgctcattaattttccctgggtggatattgcgtcagggtacagtgttctgtgaagtgacttatttttaactaccagatctgattccttcagtgcatattttcaaccttgacaggttttctctcttcttaatttattaagaattaatctcggctgggcgcggtggctcacgcctgtaatcccagcactttgggaagccaaggtgggcggatcacttcaggttaggagttggagaccagcctggccaacatggcgaaaccctgtctctactaaaaatacaaaaattagccgggcgtggtggcacttgcctgtaatcccagctactcgggaggctgaggcacgagaatcgattaaacctgggaggcggagattgcaatgagatcgaaccactgcactccagcctgggtgacagagagagacactgccttggaaaaaaaaagaatctcactcactatctagagaggattgtcagaatattcacgattcaggtcttgaaactttgattatgcaaaagaaggtatataataaatatttcattatgattcagtttttaaggctttgcagcttctataagtgttctcagatgccactagataattttaaaagcatcatattagaaatactttaagaagacttatataagaaatagaagattgttgaattttacagaggatttggttcattaagacccagattctgtaagttttcattctgaaattctagttaaacatattcaccatttttcttaggaatcttatacaataaatccttcaggttgcacaaaagcaaattattagttttcattagaaactctggttctgaattacaatcataggttatataaatttaactgttagatggtctataaaaatgacaaatcttattaaaatatgtgcaatatttatgggagtcaaacagcttcatatcagtgataaagattgttattaaaagataaatactgtctgttaannn

SEQ ID NO: 21994 - DNA, 2069 bp, Homo sapiens
  misc_feature 2055, 2056, 2057, 2058, 2059, 2060, 2061, 2062, 2063, 2064,2065, 2066, 2067, 2068, 2069: n = A,T,C or G
cgagggaagcgagcccgggcgccggcgggcggccgtcgcgtctgacagaccactgcagaccacgggccgaggcccagcgcccgtccgcagcgcggccggcatggcggcgacaaggagccccacgcgggcaagggagcgggagcggtctggcgctcccgccgcaggaagtgaccaagttcactcctggatgctagctacaagccaagccttagacactgtctggagaatggcaaaaggctttgtgatgttggcagtttcatttctggtggctgccatctgctacttccggaggctacatttatattcagggcacaagctgaaatggtggattggatatctgcagagaaaattcaaaaggaacctcagtgtggaggcagaggttgatttactcagttattgtgcaagagaatggaaaggagagacaccccgtaacaagctgatgaggaaggcttatgaggagctattttggcggcatcacattaaatgtgttcgacaagtaaggagagataactatgatgctctcagatcagtgttatttcagatattcagccagggcatctcttttccatcatggatgaaagaaaaggacattgttaagcttcctgaaaaactgctgttttcacaaggttgtaattggattcagcagtacagttttggtcctgagaagtatacaggctcgaatgtgtttggaaaactacggaaatatgtggaattattgaaaacacagtggactgaatttaatggcattagagattatcacaagagaggaagtatgtgcaacacccttttttcagatgccattctggaatataaactttatgaagctttaaagttcatcatgctgtatcaagtcactgaagtttatgaacaaatgaagactaaaaaggtcattcccagtctttttagactcctgttttccagggagacatcctctgatcctttgagcttcatgatgaatcacctgaattctgtaggcgacacatgtggactagagcagattgatatgtttatacttggatactcccttgaagtaaagataaaagtgttcagactgttcaagtttaactccagagactttgaagtctgctacccagaggagcctctcagggactggccggagatctccctgctgaccgagaacgaccgccactaccacattccagtcttttaagtccgctgggggccgaacagcagtgctcaccagtgacggtggtcacagttgcaataaagtctctctctgaaaccaaagctagcatttcagcatggaaggaattaggaccttttcttcaggattacaggtacactggatgcagccatgcatggatggtttttctttatttttcagtgatttcctctgaagcagctgcactgatacatttgggagttggtggcttgactttgtccataaggggcgtggccacttcacatgatggcgggcctttaagagcacaaagaagtttaatatggacaacaacaggaaaaagcaagaagaaaacaagtagggaaaaacagctaacctggagagaaagaatttctttaacctttatgttcttcattaaaaatcttatcttggactgatttgagggatttttagaaacatggccttattttatataagcattaccttcccaggaatctttgttgtatattaatttttgataaccatttgattaactttaaaattaagtatatgtgtgtatatatacatatgtatgtttatatacacacatgtatctgtatagttttatatatacatatatacacatagacatacagagaaccactactttgtaatagtgtacagtttgttttatatctctttactttttttgttactattttatctggccagcgtaatagttttatttagattttttaaaattctgtagattaaagcaaatgacagttattgaactatcacaaaactattaaactgtggtacatttaatgtggttaccaaaaaaacaggagagagaacgaggaaagaaaaaaaaaaaggggggggggcgcgcgcgaaagggttaaaacatggggggggggggccccagggagtannnnnnnnnnnnnnn

SEQ ID NO: 21995 - DNA, 557 bp, Homo sapiens
  misc_feature 556, 557: n = A,T,C or G
acaaggaaacatgagtcctcaatatgcttagagtgcacctgggaaaatcagacacaaatagaattatgatggaaaataattggtaaaagataataaagaccaaatgaagaaaacacgtagtaagaattaaaggatgttagtaggtggtagattgctcagagaaggtattatggaacccacgagtccagagtcagccctgaatgagtttcggtgagcagggcaagaggggagcagggatggtatagaaaaaaaggcagaaaagtgcaaggtgtgaagccatggcttgcacggttagtagagagcaaagagactagctgcagttgactcgtccactgatcaaatgatcagcttgtagggctgtacagagtaatatgtcactgctgttccattcactaatcactaatgtgacacaaacctcaatattaaaacagttataaaaattctaaattttcctgcacccaatcattggagctaattctatttgtacccgttcgcttctcctgaaagtccatgcacatttccacagcaaatgaaaagagacaacatctacacttann

SEQ ID NO: 21996 - DNA, 1386 bp, Homo sapiens
  misc_feature 1, 2, 1363, 1386: n = A,T,C or G
nngcgtccgcaaaaagctctcagatgggacagtcttttactttcattctcacctctgtaaatagcaggacaggttggggtgggcctgacttctattctgctttcagggggtacttacctggaaaatcaacttaggaagtgaatttgagggttggtgtaattttaagcccagcctctgatccttggttgcacaaagcctaatttccaaatatttctaacagattcaagactgtattggcaaagaggtagagagctatgataatgacataaattacataaaaatccagttgaatgaataagaaggaatttgggcgtataacccatggaacaccaatggtgctaagaatttgccaaaccctcagcttcgtataagtcccaaagaactcaggcttatagcactaagcaaattaccagtgggagaggagacctgccacggagctggataattacatttaaatatttttgccaatctgttggagaccctggcttcattagcaccaagctctgacccaagggggcccaacactatggcaaaggcaggagccaggattcatggctgccatttacaaagagctatagcgagccccccttcttcttagtttaaaaccaaattcatttatcatgtcgaccgaaacagcctggtttgtgtacccttatgtctctcgctgttgggataccatttgaggtctttcaagagacataacattatctctaatggcaccggcatcataaaacacagtaacggttgtttcccctcccatttgctcctaatgctggagaggttcaggctgcctggagctgcagcttgggccccgcagccaaccaattaagcttccaagtcacggataagctcgataaatagatggtgcccttaggaacatttgatctctgaattatcttaaatgaattaaatgaatgggagagagctggagagaggagaagtgagcagagatgcgggcaggcggtcattttcgagccttttctcccttctgcagttcagcactgggaaaggcgtgaggcggccggccgtttggctgaatgcaggcatccattcccgagagtggatctcccaggccactgcaatctggacggcaaggaaggtcatgctgcgtggtattagccaggaatgctgatggtgccggggtgcccctgcagcatgccatgtggctgggcctggggcacgaggtgggagggttctctactaagacccagtcggctggggggccttttcagattggagaagcaaatggtcaaaaccccttggtcagctcactgcggccaaattgattgcgttcctggtggtgcacaagctgatatgcagcagaggtgggcctgagcctctgagagcagtccactccgcaganagggagcagagcaacacccagan

SEQ ID NO: 21997 - DNA, 2556 bp, Homo sapiens
ccttttttttttttttttaaatagaactgtcttatagatttattaatgaaaaatactttacaaaaacagtatgtttggcctaaaatagttcagctgactctgagggtttacattgacgactgagcaagtggcaataatggctgtgttattgaggacagaaggctgtgttagtgtgcctgactccatctgttcaaaagggtgaatgttatgttggcagctccgcattctaggcctaaggtttggagggcacagggaatgctgacaggccataatacctgggcaggggggctgccctgatgatgtcatcagaaccatgaccacagggctacatgtccccccaaggatgggagacagggaagacaaagggtcaggtaatagggataggtggataaaacaaagagtagaagttgggagtatagtagggaacagaggatgagggctcaggtggaggtggggacataaagcatccaggaataaaatgtgaccttaaaatcctaaggaatggctagtatccagagtaataccatggattcatctttaaagtggctcagataaaacccttaaacagcagctgcttccttttgctagggggaatggaagttggaatttcaaatatcccctcccaaagaatcacatctttttagaggttcctgacacccttaggagaacccaccaattctatgttgagatgagaatagcacaaccatggcagtgatgcagggtaccaacgctgccacagtagtttattttgttgttgttttgttttgttttttgagatggagtctcactctattgccaagctggagtgcagtggtgcgatctcggctcactgcaacctctgcctcccgggttcaagcaattctcctgcctcagccttccgagtagttgggactacaggcacgcaccgtcacgcctggctaattttttgtattttggtagagacggggtttcaccatgttggccaggatggtctcaatctcctgacctcgtgatccacccgcctcagcctcccaaagtgctgggattacaggtgtgagccaccgcgcccggcccacagtacagttttacaaagaaaggtgtagctccaggaaaggaaaggaataacctttaccattgactgtgctgcaggactctagccctgatctgctctcttctgggagcatctgatagaacaaacagaaacccctctcccactgttctcctgtgtccagagtgggaggcataactgctttgcctccagtcatcatctgggggcatatctactcttcgaggaccaggggttcgggaccctggaacaggatctgaattccaagctgacctcaggggtacatgaagactgctagatggtgggtacacaggatgaacaatgggagggtgggagggtgaatggaaaagatcactccaggactgagtgtgaggaacctgaaggcccttgcttctttctggtagtgtggcagtgtaggttagttgaggattgcaccctggagtagtcaggaatctggtcccaatatgctggttggtctctgaccagggtgcccaggagttgtctgttctggagcgatgggggaggctctggtagttcaaagtccttcctgtgtacttggccccttgggaagtttcacccctgtcacacatagccagaaactgctggacactccttgaagttcctgggagtctattgggctcccctgccatggtgggcatcaggacatctggggacaggaactgtggttggggaaggtagagttggggaccgaggagaaacacagaagggtcatggatgacagggagggaagaggagctggaacaacggtgcccggtttccaaaggcttcctcacgtttgatgaatcaaaactgtgggaagaaaccggagcttcctccctctctgagacaacggtgccactgagactgcgtgagatgcgacgtaaattctctgcactgtactgctcatcctcaccacactccctgctgaggcctcggcaaggtgtagccttcaaacacacagacacatacaggcagacacataataccagacttatggttttcccacagacagtatcctcagggtatgggaaagagtaggggaagactcagtagtaatagacacctgaattagatgtattggtaagatagtggccatgtaacaatctcctctaattcaaaagaagcccaatcatagaccttattttcttctgatagccccatatcaccatgccctctgccttatcatcatccctgtcacatctctccataattccttccccaacacaccaccccaggcccagcaccttagcacctgaggctgctacctgagaagtacgcactgttctggcttcatggagaccatgctccatttctgctgttgaagtctttgagagaccaggatcatgggctgagtgcaacctcctccccatgccatctgcagagcctgaagaggaaaacacaaatacaagttgaggccatctcttcccctagggcctaacctctaagcctagcagcacaaactcaggagctgttgtttcatttaataataaatatgcatccttgaattcaac

SEQ ID NO: 21998 - DNA, 1758 bp, Homo sapiens
  misc_feature 1752, 1753, 1754, 1755, 1756, 1757, 1758: n = A,T,C or G
gcgtccgaaaatagcccacatccaggcaaaggggcctttcccttggcccagaagaaaaaggaacaagtggagtgcagaagaaaatctgtactgagagacttgggcctagcttgtcttccagtgagccaaccaaggctggtgctgtcccatccagtccctcgacgccagcaccacccagcgccaaacttgccgaggactcagctctgcagggtgtgccctctctggtggcaggtggaagtccacagactcttcagccggtatccagcagtcacgtggctaaagctcccagtctgaccttcgcttcccccgccagtcctgtctgcgcatcagacagcactctccatgggttagagagcaactctcccctttcaccactgtccgctaattatagctcacctttatgggctgcagagcacctctgccgcagcccagatatcttttcagagcagcggcagagcaaacataggcgctttcagaataccctagtagtcctacataaatctggtttgctggagatcactttgaaaaccaaggagttgattcgtcagaatcaggcaactcaggtagaactagaccagctaaaggagcaaacccagctgtttatagaagccaccaagagcagggcccctcaggcttgggccaagctgcaggcatctttaacacctgggtccagtaatacaggcagtgacctagaagcattctctgatcacccagccatatagcacagaggcatattttcctgttacttgagtggttcttttagctcatttgctgttacctactcctgtttcccaaagcttatgtaagagcttttccttctaaacttaaactgtgttgtggttcacttaggaagccacgtgccaatacctggctgctgtcttaactcgtagtctgggcacaggatacatatgtccccgtcccactgaggacctcagtttgggagtgcccttgagccccttttccttagcctgcaggtgcttcaatggatcatggggcaaagcaggagatgattgtgtggggctcttcctgctgtcacctcccatcatcccactctctcaccaggatcaagggtacagtaacacgaatgagcatacagagcaacgcctgtcgagccagggagtaggtgacacaaggaaaccttcatggatcttcccttgcctgtcttagtcacagagagcaaataacgaggaggtctgcctgcatcccacaaggcatcgtactagtcgggcgagacctaaaattccctgggcacaggttgcacctgggtgtgagcacttaatcactcaacgctctgtttaccttacacttgaaaatcaagggaaccgagtagtaccatctgactcctacactttcattacaagtcagattctccttaaactagcaggcaaaaacagtacttccaaacttccccggtctggcatgactgcagtacatctggaatcgtagtcgactgacattgctctccggacttaagacagctgacgcaccctcgacactagccggcatatctcatggccccgcgccggccgccccctgcgcaacctacgcccacccacatccccccccgcacaccagcaaccgcgccccgcccccacaccccccgccgccccccgcgcccccgggcagccccaccacccacaccgccgcccacaccgcacaccacccaccccacacgcccacgccccaaccccacacacacgcacccaccacacgcccaccccctcccccaccacacacgcacccacacacaannnnnnn

SEQ ID NO: 21999 - DNA, 4371 bp, Homo sapiens
aaagggatttattttagggcgggaacccggggtccccaccctgttaaaaaccctttttgggttgggccaacccccactagaaagccggggaaaaaaaggcttttttgtggaaattttgaagggaatggcttttttggtacccctataaagtgccaaaaaccaggttaccccccccaatggccttctttttttttttcaggttcaggggaggggttggaggttttttttttaaaaaagtttaaaggccgcccctttttttttttttttttttcaaaccacatccgtgaaatcacttttatttttatttttttccacatagatgacttcatgtcaactacaaaaatcatgaaatgaagaactgattgtgaaactgcaaactcaaaatcactggagtgataaacaggttttcccccagatgacttaaaaaaaataaccaggataccatgaattcatgtttaagtagtaaacatgtcatatatttaaaaataataaatatagaatagcagtacagaaactaatagcataaacagcatgaagtatattttacttttaagacagatgaaatttctaggcacagctttaggcattaaagaggacacagaggcataggttagagtgcactgctctgtacaaaaatacagtctgaataaattacattgctagccatacaattagacgtcacttaccagtcagttcattgcatgtttaataatatacaggtacatgctaatccatatatatcatttatattcaaacacataagtctctctatatttatgtctttaaaatttacatgttgaacttacaaaaagctaaataattgtgcaagaaatcggaataactagccctgctgagtattttatgctatatgtgtgtgagtatatatatgtgtgtatatctatatctatagatgtagatctatatccatagatatctatctaacaatgggtttgtggctaaaaattatgcttaagaacacatctaacaaacctaaagctgcaaagacataatgttaatgtaggtgaaaatttcacttgtgtttattctgatagacaaaattgtattttagatgagaagcaacaattttcatgttgtactgagattgttagtaatgaaatacttccaaatattagtgatggtagaaatctagtgtagggctctttgctgagaagggaaaaaagtcacataagaaatctacttttcagtaaactgcaaatatgtgtgcttcaacctataacatattctgtcactttgagcttgtcatattgacagagaatgaaaacttgataagactcgagatgtgatgatattggtttaacagtacactgcatcctctactaggaccaagagaagtgcctcattggtgtcagcaccaaagtactattctttcattattcaggaataaagagatctcagaacagagaatgtttagttgctgaaatccctatccaaatatcatatttctcatgctgctctgacaatatgcaattaactgcaagacactctgccccagattttactatttctcaaaaaattgcttcaaaagactctataatactatctttctggagaatttccactcataatttctaatgattctttatagaatcatatatttttataaaggtttctgtctgtgatgtatttattcgcttttgtctatcattgctaaagtaagactaaacctggtacttcatattcgtgattttatagaaaattcatgtgtgttttctagcatttggataataaaataggttttttttttttttggctgttgtttttggcaaccattcttaagacaagctgaaagaagaactgtgttttgggaggtaaaacaaattattaaatactatcgatgtggtcctgctcttaacagattttgcaatacagtaacatatagctacttttaaagtaatttttctaatgcttctttctgcaagagggccaaaaccagaacatactgttttagtgtctttgttaacaaaaataattatttataacttttatattagaactgtatatttgatataaaaatatgtttataattaagctatccaaatttgtatattaaacagaattaacacaagtttgcagcatgagattagttgcaaacttattccctattattaatacttccttccattgaacagtcagtaagtaattcccttaacataaatccatcctaagtgtgtgcacaaatcggttagcccatcagttaacttcagaggaccaggtgataaccagatgaattctactcctctactgagacatttagatatttatataaatctatcgctattcctttcttaaaaaaatgaagacatttaaaatacttgcaaaaaatagcagccttctattttaatgaattttacacaaaatgatcatcctaattgctactctcttttcaactacagtgcttacagagaatcattaattttcagattaacaccatttcaatttttattcttaggcaactctattgacactttccagtgaaacagtaaagaacatagagcaaaagctttaaggtaccatacttttgtatggtaaataagtatgaataccaatctaagcctcttaacaatgtgtacaaggttagtgctcaaaccacttcactagagtaaatattaattttacgtgtgataggcaaatgtatgtggagggttagggaacaacttattaccatttatactaatggttcaccttctataaaaacagtgaagcttgttacatacgcacacttgtttgctgcaatgtttggcaaatgatttaaagggtacaaaagcaactcatgcagatttctttctgtttgccccaggaaaaacagagatcctcaatttttccccagtctagatagggctgaggcaccaatttctaaccacataatgagaagcacatgtctccaagtcttgactctcttcccagggagacgctgattgccaaagcataacctcccattaaaaagagtgttcctgaaggtggaatgtgtatcattaaccagttacattcacaactcccattagatgctgaagggcagttcatttttcaagggctcactcaagcaaataaccaacagccaatgtagtcattgggtaggataagcaggcggtaagggctctaacagtggaatccttgtcagcgcaaaggaacttctaaatgttgcttatgccaactgctcccctgcaggcaataggagattgaggcaaatctcattccaactagtttctcacaatggttgctgtcatatagacccttcatttgtcaagaaaaacgatatgaacatattggaagtttgcagcatttgcctatgtctaatcagctctcttaatttgtgcagatttctaaaatggatgtaaaagctggttatgatgttgacagccaaaaggcaaaaaagattaaatcaactgagcaaactgcttgatgctccacaagtgttttagaatatagtaagttagaaaagatgcagacgtaatccttttgttggatggtggtggttgtttttactttgagactattggttctagtagtagtcttcatagttcttagggttcaggcaataaaggatggcacccccaaacgaaaatatagttgcaccccaggccaggccataaccccagttgaactcatggtaaattttcaagctcacagtttcaatgaacttgattgggtaaaggaccaggctgcaaacctgtaaaacaactgctgcaaaaagcatgaccgcaacaggtctatagaaacgccttcgagatcccacgcagatagaaatcaaacccaccaggaatgcaatgagaatgatggcagcgccgcccaggagtaaagccagagtagcaatctgccaatcgctgctgagcgtggactcgcagtgccagatgtccaagctggcgggtttccggcaggactcccacaacgacaggtagtactggtggtcagctgtgacccaggccgggctcagcaccgccccccaggtccagacacagcgccaggaagatgcacaccagcccgaccagcttcaagggggtcagcaccgacacgcgcacctcctccatgccgctgcccgccgaagccattcctgggcgccgctgtcgtccgccccgccgcaggcgaggacgccaggcgggtccggagagccgggagccggacctcccgaagggagaagccgccgagctgccacgcgcggggactcgctccctcggggctctgcgcgccccctgccgcgcggccaaggtgggtctgcggaggcggccggccgggtgtgggtcgtcggcagccgcagcgacgtcgattccaccccggaccttcgccgccggccccgcgccgcgctctgccagcgcccgcgcccgctcctcccggctcggccgggcggacgcgtgg

SEQ ID NO: 22000 - DNA, 4348 bp, Homo sapiens
  misc_feature 1, 2, 3, 4, 5, 6, 7, 8, 11, 12, 19, 4348: n = A,T,C or G
nnnnnnnnatnnagactcnctatagggagtctgccccacgcgtccgctccactcctagtttgttctgccgtcgccgcgtcccagggaccccttgtcccgaagcgcacggcagcgggggggacttcagccctccaggcggggtgggttccaggtccgggtccgaggcgggcgctggaggctcggccccaggccggagaggaactcctttcgcgagctgccgcaggcgccggcgtctcagctgctcgccgccccccaccccagagtgcgtgccgggtgactcccgccacctttgcgaccctcctgagcttaggggactgcgagcgggagggagtctcaggcccccggccgcaggatggtggcggagcggtccccggcccgcagccccgggagctggctgttccccgggctgtggctgttggtgctcagcggtcccggggggctgctgcgcgcccaggagcagccctcctgcagaagagcctttgatctctacttcgtcctggacaagtctgggagtgtggcaaataactggattgaaatttataatttcgtacagcaacttgcggagagatttgtgagccctgaaatgagattatctttcattgtgttttcttctcaagcaactattattttgccattaactggagacagaggcaaaatcagtaaaggcttggaggatttaaaacgtgttagtccagtaggagagacatatatccatgaaggactaaagctagcgaatgaacaaattcagaaagcaggaggcttgaaaacctccagtatcataattgctctgacagatggcaagttggacggtctggtgccatcatatgcagagaaagaggcaaagatatccaggtcacttggggctagtgtttattgtgttggtgtccttgattttgaacaagcacagcttgaaagaattgctgattccaaggagcaagttttccctgtcaaaggtggatttcaggctcttaaaggaataattaattctatactagctcagtcatgtactgaaatcctagaattgcagccctcaagtgtctgtgtgggggaggaatttcagattgtcttaagtggaagaggattcatgctgggcagtcggaatggcagtgttctctgcacttacactgtaaatgaaacatatacaacgagtgtaaaaccagtaagtgtacagcttaattctatgctttgtcctgcacctatcctgaataaagctggagaaactcttgatgtttcagtgagctttaatggaggaaaatctgtcatttcaggatcattaattgtcacagccacagaatgttctaacgggatcgcagccatcattgttattttggtgttactgctactcctggggatcggtttgatgtggtggttttggcccctttgctgcaaagtggttattaaggatcctccaccaccacccccccctgcaccaaaagaggaggaagaagaacctttgcctactaaaaagtggccaactgtggatgcttcctattatggtggtcgaggggttggaggaattaaaagaatggaggttcgttggggtgataaaggatctactgaggaaggtgcaaggctagagaaagccaaaaatgctgtggtgaagattcctgaagaaacagaggaacccatcaggcctagaccacctcgacccaaacccacacaccagcctcctcagacaaaatggtacaccccaattaagggtcgtcttgatgctctctgggctttgttgaggcggcagtatgaccgggtttctttgatgcgacctcaggaaggagatgagggccggtgcataaacttctcccgagttccatctcagtaaaagggaagcaggaagaccaagaaggtacgaagatggcacattttcacatagctgattttcaaccaaatgaaaaaaatcaagtgcatttcagaagcttttggaagagcagcttaattcctctcagtcgggaaatgttttctctgccttctgctttgcttgcaccaaacatttctaaacacttgttctgccatctacatgggaggtgatgaaactcagtggtaactcatgatttatgacattgaaaataaagaggaacattgacctgcagactatggtttgtacaagaaagtttgtttgaatgtgtagaagaggaaaaagcaacaacagcaacaacacgaagatgataccaaaacaaggaccacaaaacaactagccatgatgggagacaggagttttttacatggaaacatggcacttgtgtttttatgtggcaagatctttatccataggcagagtatgaaatttcccaccaggctaagcaaataaagaagtccattgccttatagctatgtcagatcacagaatccttccaagtgctctatcacagtgtgccttatgggaagtttctgactggaaaatcttgtcattctaacactgaaaagtgcacacgcatgacaaaatgtagacaagatgcctcaaggtattggtagcaagcaagattttgccctttagttttcgaagacacctttctttcattatgcactcgggacaagaaaattaatagagcgttattccacagaaggcctctagccagagatcttgagtgtagtgcaagggactcatgctttgcgaacttgtccctgtgactagtagattcccccttttcctgtgtttaggatttagtagtgcataaagcattaatatccataaacatacctagaagtttgttttgcttttaatttaaaggaagcagtaaccacaaagcttccgctcagggttttttctttcttcaagtctccaagggctcttcagcgtcacaagccagcaactctctttgcattaaaatttcaaagtttaattaatataattaaaagcaacagcaagcagcagcctgtgaagattttgctcatcttttttatgccttttgacattgaatgacctattactgtatgcgcattacttggattttgaggggcactctaccttggttatgattcagtagaggaaaaagaccacctttcttcaatttacaaattaaatcttctggagggtcgctatcacaaaacattgacgatgtatgtattataattttttagaaaaaccaccatcgtgtcacgtcgacgatgccaaattatgttagcgtgagcagaaacaccgtgggggaggaaggcagcagctgaagaaaaaagctcaaatgatctagtcactttcgatactgtacttcagatgcgaaatggatattcgagtggaaacctgacaaagtgcgcctgctttgatgtgaactggtatagacaatgaccagtggctgggtcagtgggatgtctctctgtgagcacaaaggcttatcaaatgacactaaagataagttcaacaaccatcacattggaagggagaaggcgaacatttcatgtttggcgggcatgtgagtgcacaagatggaaagagcgattggagcatcctggtataattacccccattgtgctcttaatggaaatttcaaaggacgggagtattctgttggttggtgtccaggtttgtggcactgttccaagaggccttacacacacacacaaatatataattttctatacatatatatcctctagcttgaaacttttgctcaagtttatttatgtcactggctggctggatccaaagtcatgtgtccacacattcataaataaaaattttacctatgcctgtgctaccatttctttaagcccacataaagctaatgccttcttgggttgaatatgcagttgttatgcttagtttcagggatggaattctattcagttccaaaatgtccctcatgttcacagatgatactattggcagtagctgcatatgcaagtgtaacttggaagcctgatatagtatacccaaccctttctgcaatgagttattgtatccctttgttctgcatttgcatctggaacaagacctaatgtggcttccttaaatgggcacttcatttctgatgagtgcacaccaattattgctattttaatatcattgagaatactacagaagctaaggctatgtttctttggtaactacttcaaatttctctagaattatgtagcatacttacattttgctgcatgaacaatgaaaattaacctctgcctttaaatggaaaaataactttctgtagattgttatacagctactatgaagagctcttaatgaagaggaagtggcagtggtctatatgtagactgaaaaaatatcattaataaagttcaaagactgatggaatttcattgcccttaaagatatgaaccagatctgttttatgcttttctccaattatactaactagcagttgaaaagaaaaaaaaaaaaaaaaaaaactgcggccgcaan

SEQ ID NO: 22001 - DNA, 1736 bp, Homo sapiens
  misc_feature 1, 1732, 1733, 1734, 1735, 1736: n = A,T,C or G
nagaccaggtcttcaactcctggcctcgagtgatccacccacctcagcttcccaaagtgctgggattacaggcatgagccaccgcgtccagcctagacttctaatttatgtccacattggagctcttcctgttctctagtatgatgatatggagggtagtgacagttgtcattgcttacagtcatccatttttaccttagaatcttcgagaaaaagatgaagtattattctcagtttcgagatcagactcctcaccaccaggcgggggctttaaggtagacactacagggaatctgatctcagggtgatcctctcccttccacttgcaaaaagagaggagcaggtgggccactgctctctgagatgttaacacccctcacactccacgggcatgctttgtcattctgcacaccggtgtagctgcagctctgtgtgaattcagatctcaagagaaatgtaaatcaaaagtatgagtttctttctttcttgggtgccacagtaggaatgaaatgatggggacttttggaagcccctggacttgtggcccctgtagaagagcagcttgggcagggtgtgatggccatctctgtctctaggggccctgtggaggagaggctgcagctagaggctgggccacaacagtgaaagctgcccctgagtggaatgttgtcagtgtccctccacactggggggctgctgggtgggaggacaaagctgtcctccagaggctgtgcctgaggctgggtgaaagtgggcactgtggcatgtaccatcagacatgtgcagttgactgtggtgagcacaaggctacatttgcagccaagcccaccagaggacccagagctagagggtgatgcttggaccccattctgcagggcagtttctcctcgtatagggtgcatgtctgtttagggccatgagaagcactggttgagtgcttatcaagttccctgtgcccggccacataactttaaacccccagcttagtgactggctacaagagtcaaactctgttcacaagccatgctacctggactcctggttccatttctcaggagtctaccagtgctgccttgccactctgtccaagctttgtaagaatgcccagatgtgtacaaggatgacccatttgtgggcatgtatggcctaaagagcctgcccagccccaaggacttcttagcagagcagggcccttagtgcatctggggtgggcccagagcagctgcagccctctctcctgcacggccagagcgacttagctgggccctgctctgcccgccctgtggccatgcttccatgggctcctgactctcctagggccttcttctggaaagtgctcaagaaccgagacactatcaccaaaactggagactctgggaataggatgtcatgtgttaagcatcagaatgtcccctcccacaagcctaagagtgtctactcttgccaccctgtcatcattgtgcttgaggtcaaagccagtgccagaaggcaaggagaaatggaaaaccatccaggccagagggggagaaatgaaaccatctccctttgcagatcacatgattgcataggaaatcctagggaatctacaggaaagttattagaactaataagtgtgtttaagcaaggtctccagatataaggtcaacgtaacaaaaattcatcatatttatataatctatctgtaacagttgaaaattgaaaattttgagaaaagtgccattaataatagcannnnn

SEQ ID NO: 22002 - DNA, 228 bp, Homo sapiens
gcctgaatttagagtcagttgagaagtagagcagggatctctcagacaccaacatgttcagctttattatagataaggctgaattgatttcctggaatggaccttacttccccacctccaaactgcaggccttccccttgcaggttcagaacatgttaaggtaagttcactgcagagataaacagggtgaggacaggccagtcctaaaaaaaaaaaaagaaaaaaaaa

SEQ ID NO: 22003 - DNA, 5187 bp, Homo sapiens
  misc_feature 5183, 5184, 5185, 5186, 5187: n = A,T,C or G
ccgcgtccgcaaaatcaagaacagtgaggctgggcatggtggctgatgcctgtaatcccaacagtttgggagactggggaggaagatcatttgaggccaggagtttgagaccagcctgggctcaagcagtcctgcctcagcctcccaaagtgctgggattacagatgggtcatcttactctggaagactatcagatctggagtgtgaaaaatgttcttgccaatgagtttttgaacctccttttccaggtgtgtcacatagttctggggttaagaccagctactccggaagaagaaggacaaattattagaggatggttagaacgagagagcaggtatggtctgcaagcaggacacaactggtttatcatctccatgcagtggtggcaacagtggaaagaatatgtcaaatacgatgccaaccctgtggtaattgagccatcatctgttttgaatggaggaaaatactcatttggaactgcagcccatcctatggagcaggtcgaagatagaattggaagcagcctcagttacgtgaatactacagaagagaaattttcagacaacatttctactgcatctgaagcctcagaaactgctggcagcggctttctgtattctgccacaccaggggcagatgtttgctttgctcgacaacataacacttctgacaataacaaccagtgtttgctgggagccaatgggaatattttgttgcaccttaaccctcagaaaccaggggctattgataatcagccattagtaactcaagaaccagtaaaggctacatcattaacactagaaggaggacgattaaaacgaactccacagctgattcatggaagagactatgaaatggtcccagaacctgtgtggagagcactttatcactggtatggagcaaacctggccttacctagaccagttatcaagaacagcaagacagacatcccagagctggaattatttccccgctatcttctcttcctgagacagcagcctgccactcggacacaggagactaacatctgggtgaatatgggaaatgtaccttctccgaatgcacctttaaagcgggtattagcctatacaggctgttttagtcgaatgcagaccatcaaggaaattcacgaatatctatctcaaagactgcgcattaaagaggaagatatgcgcctgtggctatacaacagtgagaactaccttactcttctggatgatgaggatcataaattggaatatttgaaaatccaggatgaacaacacctggtaattgaagttcgcaacaaagatatgagttggcctgaggagatgtcttttatagcaaatagtagtaaaatagatagacacaaggttcccacagaaaagggagccacaggtctaagcaatctgggaaacacatgcttcatgaactcaagcatccagtgtgttagtaacacacagccactgacacagtattttatctcagggagacatctttatgaactcaacaggacaaatcccattggtatgaaggggcatatggctaaatgctatggtgatttagtgcaggaactttggagtggaactcagaagaatgttgccccattaaagcttcggtggaccatagcaaaatatgctcccaggtttaatgggtttcagcaacaggactcccaagaacttctggcttttctcttggatggtcttcatgaagatcttaatcgagtccatgaaaagccatatgtggaactgaaggacagtgatgggcgaccagactgggaagtagctgcagaggcctgggacaaccatctaagaagaaatagatcaattgttgtggatttgttccatgggcagctaagatctcaagtaaaatgcaagacatgtgggcatataagtgtccgatttgaccctttcaattttttgtctttgccactaccaatggacagttatatgcacttagaaataacagtgattaagttagatggtactacccctgtacggtatggactaagactgaatatggatgaaaagtacacaggtttaaaaaaacagctgagtgatctctgtggacttaattcagaacaaatccttctagcagaagtacatggttccaacataaagaactttcctcaggacaaccaaaaagtacgactctcagtgagtggatttttgtgtgcatttgaaattcctgtccctgtgtctccaatttcagcttctagtccaacacagacagatttctcctcttcgccatctacaaatgaaatgttcaccctaactaccaatggggacctaccccgaccaatattcatccccaatggaatgccaaacactgttgtgccatgtggaactgagaagaacttcacaaatggaatggttaatggtcacatgccatctcttcctgacagcccctttacaggttacatcattgcagtccaccgaaaaatgatgaggacagaactgtatttcctgtcatctcagaagaatcgccccagcctctttggaatgccattgattgttccatgtactgtgcatacccggaagaaagacctatatgatgcggtttggattcaagtatcccggttagcgagcccactcccacctcaggaagctagtaatcatgcccaggattgtgacgacagtatgggctatcaatatccattcactctacgagttgtgcagaaagatgggaactcctgtgcttggtgcccatggtatagattttgcagaggctgtaaaattgattgtggggaagacagagctttcattggaaatgcctatatcgctgtggattgggatcccacagcccttcaccttcgctatcaaacatcccaggaaagggttgtagatgagcatgagagtgtggagcagagtcggcgagcgcaagccgagcccatcaacctggacagctgtctccgtgctttcaccagtgaggaagagctaggggaaaatgagatgtactactgttccaagtgtaagacccactgcttagcaacaaagaagctggatctctggaggcttccacccatcctgattattcaccttaagcgatttcaatttgtaaatggtcggtggataaaatcacagaaaattgtcaaatttcctcgggaaagttttgatccaagtgcttttttggtaccaagagacccggctctctgccagcataaaccactcacaccccagggggatgagctctctgagcccaggattctggcaagggaggtgaagaaagtggatgcgcagagttcggctggggaagaggacgtgctcctgagcaaaagcccatcctcactcagcgctaacatcatcagcagcccgaaaggttctccttcttcatcaagaaaaagtggaaccagctgtccctccagcaaaaacagcagccctaatagcagcccacggactttggggaggagcaaagggaggctccggctgccccagattggcagcaaaaataaactgtcaagtagtaaagagaacttggatgccagcaaagaaaatggggctgggcagatatgtgagctggctgacgccttgagtcgagggcatgtgctggggggcagccaaccagagttggtcactcctcaggaccatgaggtagctttggccaatggattcctttatgagcatgaagcatgtggcaatggctacagcaatggtcagcttggaaaccacagtgaagaagacagcactgatgaccaaagagaagatactcgtattaagcctatttataatctatatgcaatttcgtgccattcaggaattctgggtgggggccattacgtcacttatgccaaaaacccaaactgcaagtggtactgttacaatgacagcagctgtaaggaacttcacccggatgaaattgacaccgactctgcctacattcttttctatgagcagcaggggatagactatgcacaatttctgccaaagactgatggcaaaaagatggcagacacaagcagtatggatgaagactttgagtctgattacaaaaagtactgtgtgttacagtaaagctaccactctggctgctagacagcttggcggtgagggagatgactccttgtagctgacatttggcaaaagcgtcactgaaaggcaagctaaatgtagttattttatcctgtggccctgaagcacaaaataaaaattctaattaaaatagttaactttaagagtagtaatcattttattttgaagtctcatacaagctctccgatagagaactttcaggcagatcccaccattagcctgtaaacaaaaggtttggcaccagccacctgggaccaaataagaattcaattgtgcttgtccagatatgaacaaatatgtagtgagtatagagtttaccataatcataacaaatattaaagatttccttggagtcagagtaaaaaacaaacaattataatgttgtctagggacgacatgatatgctacctcctttttcctgaagttttattccattatatgacaagatggagaaagcaagatcacgaaggtgtgcaaatgattcttaaggcatggacgaggatttttcaatttattttttaaactgtttccataccctttctttgtctttcttgctttttgtttttgccgttgtatttatgttgagacacaaccagtcattggtggcaggggcatatagtggtcagtctgaaagggaggctctcttaagagctgtgtgccttccacccagagccttgtgggagacccagtagaaagaaacagcatcctgggaaatccagctaccatggccctcccagtggaggcatcttacatttaggatacttcaagtatcctcagaaatgtattctgcacccccggccccaccatgctgagggaaggggagcagttgccaatatttgcaccatcttcacatgcacctgttgcaacaagagcttctgggaaggtaaggtggcatggagctagaatcaacgttcaacaataagtgggtgtcttctcctgggttgtctgccctttcaaacaagagagaaccatgcaatgaacttgctgtgtggtattggaggccaaggggataaatacaaacaaaacatcccagaattagagttcctaagggtttcaggacatggggttaggaaccacttattggctgtggggtcccaacactaatgaaatgcctcgaaaacagagcccaagaagtttggcctcttccacacagggagacaatattatcgggaatcnnnnn

SEQ ID NO: 22004 - DNA, 390 bp, Homo sapiens
  misc_feature 1: n = A,T,C or G
nctcgacccataatagcctgttactgaacacaactcatacattcatcaacaaatgaatgaataaacaaattgtattatattcatacaatggaatactactcagcaataaaaatgaatgtactactgatacaaatagcatggatgaaactcaaaatcattattctaagagccagatactatagcctgtattttatgattcactttcaatgaaattctacaatagacagaactatctatcaacagaaagcagatcagtggttttctgcagccagaggtatgaaaggtttgaaacatgtggcaccagtaggacatatggaaacttttttggtgtgatggaagtatttttttatcttgattgtgtggtgtttgttatacagtggtatacatttg

SEQ ID NO: 22005 - DNA, 509 bp, Homo sapiens
  misc_feature 492, 493, 494, 495, 496, 497, 498, 499, 500, 501, 502, 503,504, 505, 506, 507, 508, 509: n = A,T,C or G
actacagtataaatcatgctcctgctgtctagagcttaccacccaacgagggcttcagatagagatcagcaactgccctagagtgtggaactcctatgacaaggtgagcctggggtgtgatggaaacacggcgtgcatggttaccaagccacgcttccagggaaaggggtccgtgcgggaaaaacttcagagaggaaatgacatgtcagtcaataacctgaaagaactggatgagagttaagcaacagggaacagggcacagtcatccacacagtattttggaaagatcatgttggttatagtgcagaaaatactgaatatgggaaacaatttgttattattttttaggagtcttgctctgtcgcccaggctggagtgcagtggcacgatctcagctcactgcagccaccacctcccaggttcaagcaattctcctgcctcagcctccagggtagctgggactacaggtgcacgccaccacgcccggttaannnnnnnnnnnnnnnnnn

SEQ ID NO: 22006 - DNA, 822 bp, Homo sapiens
caccgcggtggcggccgaggtactggtgtgtccggaatcctacccactgtggggacagggcctgatagtttcttctgcctttctatcccaaaacgattgggcagtttacccaagtttgcaatgcggtttagaatctcccaggaacatctcttctagtagttgccttagccatcttgtaggtgatttgactttttttttttttgctgccagaaagctctatgcttcatatggacttgcataccaattttttgttcatctgttggtcatgatggttagcagagcctgacctcctgttacaatagaatgatcggttcctgggctacagacttgagtctgttttttttgttttttaaaccttcccatgtggcaatttgccatatgcaaaacttaaatggtagccagtttcacctcaagtttcagattccatcattgtgtttgtcccttgaaagtatagattattccccatcatgagaatgccaggtgtaggggaaacatctcctgaaagaatagcttgtcaaacgctgatagaaatttttcattagaagtctcctcatctgtgaaataagggcatgggcagagagatttatgaggttactttcagctttatgagtctgactaaatgggggaagaattgcagccattcagttgggtgccacgactttgtttccaaactcaggctgactccactcaggtcccctgccttgggttgggaatggctggcttgttgttgtcctgaggagcccatgccagaaacccaagtcacctcctttggggtatctgagggcagtgtttttcaaactttttctgtggaagctaaatttt

SEQ ID NO: 22007 - DNA, 838 bp, Homo sapiens
atagggagtcgacccacgcgtccgcctcaccagatccggggatttctttcacggtttgataatgtccttcccgtcagcctggggtttgacaaatgtacagcttgttcttccaaagttcttgatcaatatgaacgagaaggatttaacttcctagccaaggtgtttaattcttcacattccttcttagaagactggactggtcttacattgctgcatcaagaaacccaagctgctgaggtggggaacaaaacaagctttctgtagtgaagactgacatgcttaaaactatttgatattcgccatatggaaaaggaagaaagcaattaattttaatttttgtaacttagagcaaatatcactaaataagtctgctagttaccagagaacgaataaccctcagcaagtgctggatactgatgtgtgtaggttgctgtccagtaggtgcctaatacacaaaatcagtgtgataaaggaagtataggttgtagatttccaggcacctcttgtccttactgaagatctgcatgtgtatgaccattggagagagttggctttaatgtccatatatcaaaatgtaagttggtaaagacattggactccagctatgttctttagaaagaaggtattggactctggccatgttcttcagaaagaacatgcctggctttttcacgatttgatcagtcttcttagaccctgaaccccaccatgaaatggcttccccagacacaacccgagagagttatgctttgtttctcagctaaaatattttgcagatcttaatttcctgggtcattgcatcatttttttttttttttgttttaagatatggtctcgc

SEQ ID NO: 22008 - DNA, 826 bp, Homo sapiens
tacagagcccaagacaaaagataggcctgtgaggataacatctggtatatctgacccttcccagcatggccaggaggcacagccaggccagggagggcatactggtttggctttgccctgcagctgttggcctaggtgctgtggtcatacatatgccctcaggcctttccatggctacctacctagaacccagattctttttttttttttgagacggagtctcgctctgtcgcccaggctggagtgcagtggcgccatctcagctcactgcaagctccgccttccgggttcatgccattctcctgcctcagcctccccagcagctgggactacaggcgcccgccaccacacgcagctaatttttttgtatgtttagtagagatggggtttcaccatgttagccaggatagtctcgatctcctgaccttgtgatctgcccgcctcggcctcccaaagtgctgggattacaggcgtgagccaccacgcctggccggtgaacctagattctaagagagctttaagacataagctcacagacaaggacgtatctaaaaatatcagagaagcaagagttttatgaccttaaaacatctagcagagacaacctaaacctgtcaaaccaatagactcaggcaaaatgtttgaattatatttaatactgacaattcagaaaacatgcctattttattctaacaatttttaaactagttttatttaccaaagattactaagtcacgtgaacttgaaaagtatttgggcttatttatgaatgctcatttatttataagtcaatttggtatcatagacaatatacaaacagacatgt

SEQ ID NO: 22009 - DNA, 2694 bp, Homo sapiens
  misc_feature 1, 2: n = A,T,C or G
nncgacccacgcgtccggcgggcgcggggtgtgtcgggtgtcgacggcggcgctttgcggccggtcgtgcgggtcgggcgcgggcgggcgcggcggcagtggcgcgcacaggtgattgactggccagctgcctgaaggagcgccaggtcctccttgctggcaggtggcgaagcccattggggcggcggtgcagaccgcggcggcggctgcggcggtctggctcgggaggcgttcctggggccaaggccatggccccgcggctgcagctggagaaggcggcctggcgctgggcggagacggtgcggcccgaggaggtgtcgcaggagcacatcgagaccgcttaccgcatctggctggagccctgcattcgcggcgtgtgcagacgaaactgcaaaggaaatccgaattgcttggttggtattggtgagcatatttggttaggagaaatagatgaaaatagttttcataacatcgatgatcccaactgtgagaggagaaaaaagaactcatttgtgggcctgactaaccttggagccacttgttatgtcaacacatttcttcaagtgtggtttctcaacttggagcttcggcaggcactctacttatgtccaagcacttgtagtgactacatgctgggagacggcatccaagaagaaaaagattatgagcctcaaacaatttgtgagcatctccagtacttgtttgccttgttgcaaaacagtaataggcgatacattgatccatcaggatttgttaaagccttgggcctggacactggacaacagcaggatgctcaagaattttcaaagctctttatgtctctattggaagatactttgtctaaacaaaagaatccagatgtgcgcaatattgttcaacagcagttctgtggagaatatgcctatgtaactgtttgcaaccagtgtggcagagagtctaagcttttgtcaaaattttatgagctggagttaaatatccaaggccacaaacagttaacagattgtatctcggaatttttgaaggaagaaaaattagaaggagacaatcgctatttttgcgagaactgtcaaagcaaacagaatgcaacaagaaagattcgacttcttagccttccttgcactctgaacttgcagctaatgcgttttgtctttgacaggcaaactggacataagaaaaagctgaatacctacattggcttctcagaaattttggatatggagccttatgtggaacataaaggtgggtcctacgtgtatgaactcagcgcagtcctcatacacagaggagtgagtgcttattctggccactacatcgcccacgtgaaagatccacagtctggtgaatggtataagtttaatgatgaagacatagaaaagatggaggggaagaaattacaactagggattgaggaagatctagcagaaccttctaagtctcagacacgtaaacccaagtgtggcaaaggaactcattgctctcgaaatgcatatatgttggtttatagactgcaaactcaagaaaagcccaacactactgttcaagttccagcctttcttcaagagctggtagatcgggataattccaaatttgaggagtggtgtattgaaatggctgagatgcgtaagcaaagtgtggataaaggaaaagcaaaacacgaagaggttaaggagctgtaccaaaggttacctgctggagctggtctgtaagatattctgggacagcactgttgccattaagtgccttgtttttttatgttcacaaatgtatatgaagaaactttctcaaacttactctttctaataacccactaaagccagcttaaacactctaaaagtactttgtaaaccaacaataacttgatgtgtagcattccatattatttcattacgttgtactcctaaaaatgggaagctgttaataaattataacatttaggtcagcactctgcatccatgagtattgtagatatttatattttgtgagatattaacttgtttaagaaaaatccgattggattactatggaaaaagcaacttgcctgttctgtttctttgcatactttgtgacctaacagttttaacagacattctattatatgaatacagtttttttgatactattagattaacttgaagtttaataccaaatattatgctaagagtagaaaagctttctgctgacccctgatttcttagaaatatcccacataatccagcttatcccttttctgtatatgtttattcaggtttacctgatgtctcaaaatgaaaccaaattaagcctttttaaaggctgatgtgccatttgtattaagttatctttgtcattttaaagacatgaattccccaagcctaattcctacttaaggaagagagacaatttagtccttactttagaaaataaatacttaagcataaaaaaaaaaaaaaaaaaaaaaaaaaaaaaaaaaaaaaagataacttaatacaaatggcacatcagcctttaaaaaggcttaatttggtttcattttgagacatcaggtaaacctgaataaacatatacagaaaagggataagctggattatgtgggatatttctaagaaatcaggggtcagcagaaagcttttctactcttagcataatatttggtattaaacttcaagttaatctaatagtatcaaaaaaactgtattcatataatagaatgtctgt

SEQ ID NO: 22010 - DNA, 514 bp, Homo sapiens
  misc_feature 1, 2, 3, 513, 514: n = A,T,C or G
nnncgtccgagacacctttgatgaaagctgcaagagctggtcatttgtgcactgtgcagtttcttattagcaaaggtgccaatgttaacagggctacagccaataatgatcatacagtagtgtcgctggcatgtgcaggaggccacctggcagttgttgagcttctcttggctcatggggctgaccctactcatcgactcaaggatggttcaacaatgctcattgaagctgcaaagggtggccatactaatgtagtttcttatctgttggattatccaaataatgttctgtcagttcccaccacagatgtgtctcagctccctccaccttctcaagatcagtctcaggtgccacgtgtgccaacgcatacacttgccatggttgtacctccccaggaacctgacagaacttcacaggagaactctcctgcccttttaggagtgcaaaaagtgcactatccaaagccagaaagtccagttccctcccaggtagcagatcaagacctactgccann

SEQ ID NO: 22011 - DNA, 597 bp, Homo sapiens
cgcgtccggccattttgttcagcttgccgggcaaccggcccctgctggggactacaagtcccgtaagcctccgcggcggcacgtcctaccctacactgtccagccggctccctttttccccctccccgggggccaagggctccggctgctgcctggcggccaacgggccaggtaggatttccgggagaggctgctgtggaggctgaggaggcggcggcggagatctggaatgaattttctatctgtgaaattgtgaagacgaaaaaagaaaattgtgctagttttgctgttgtactccacattgcagaagttacaatcacagtgcacaaaacagtatctcacctccctaaactggttaatagtggcatggaagatccatttgaggaagcagaccagcccactacagagccaggcatggtcctggacagtgtggaagcaggagacacaacacctcctaccaaaaggaagagcaagttctcaggctttggcaagatcttcaagccctggaaatggaggaaaaaaaaaagtagtgataaatttaaagagacttcagaagttttagaacggaaaatatctatgcgaaagccaagagaagag

SEQ ID NO: 22012 - DNA, 1431 bp, Homo sapiens
  misc_feature 97, 1430, 1431: n = A,T,C or G
cgtccgctagtttggtagggaatcaccctgagacctagtcctcaatttaattgtgtgggtttttaattttcctagaatggaagtgactgaaacaatngagaaagaatacagcacaacccttgaacaaaatgtatttagaaatatatttagttttatagcagaagcagctcaattgtttggttggaaagtaggggaaattgaagttgtagtcactgtctgagaatggctatgaagcgtcatttcacattttaccccaactgacctgcatgcccaggacacaagtaaaacatttgtgagatagtggtggtaagtgatgcactcgtgttaagtcaaaggctataagaaacactgtgaaaagttcatattcatccattgtgattctttccccacgtcttgcatgtattactggattcccacagtaatatagactgtgcatggtgtgtatatttcattgcgatttcctgttaagatgagtttgtactcagaattgaccaattcaggaggtgtaaaaataaacagtgttctcttctctaccccaaagccactactgaccaaggtctcttcagtgcactcgctccctctctggctaaggcatgcattagccactacacaagtcattagtgaaagtggtcttttatgtcctcccagcagacagacatcaaggatgagttaaccaggagactactcctgtgactgtggagctctggaaggcttggtgggagtgaatttgcccacaccttacaattgtggcaggatccagaagagcctgtctttttatatccattccttgatgtcattggcctctcccaccgatttcattacggtgccacgcagtcatggatctgggtagtccggaaaacaaaaggagggaagacagcctggtaatgaataagatccttaccacagttttctcatgggaaatacataataaaccctttcatctttttttttttcctttaagaattaaaactgggaaatagaaacatgaactgaaaagtcttgcaatgacaagaggtttcatggtcttaaaaagatactttatgtggttgaagatgaaatcattcctaaattaacctttttttaaaaaaaaaacaatgtatattatgttcctgtgtgttgaatttaaaaaaaaaaatactttacttggatattcatgtaatatataaaggtttggtgaaatgaactttagttaggaaaaagctggcatcagctttcatctgtgtaagttgacaccaatgtgtcataatattctttattttgggaaattagcggtttctcttcacaccttcacacggaacacgcactactaccggttacgacaattctttaccggctttcctccaatttaagcatggaatgagaccctggccaggtccggtaaacgggcactccccggcacaacacggaacaagcagggtccaggttgcacnn

SEQ ID NO: 22013 - DNA, 1058 bp, Homo sapiens
  misc_feature 1056, 1057, 1058: n = A,T,C or G
agcatgctggtctcaggcggtctccgctaacgatccttcctcaaagcatggttgctgagtacccagagttgcgaggagttttttaactgatttagccaggtggcaatcatgagtgaatggatgaagaaaggccccttagaatggcaagattacatttacaaagaggtccgagtgacagccagtgagaagaatgagtataaaggatgggttttaactacagacccagtctctgccaatattgtccttgtgaacttccttgaagatggcagcatgtctgtgaccggaattatgggacatgctgtgcagactgttgaaactatgaatgaaggggaccatagagtgagggagaagctgatgcatttgttcacgtctggagactgcaaagcatacagcccagaggatctggaagagagaaagaacagcctaaagaaatggcttgagaagaaccacatccccatcactgaacagggagacgctccaaggactctctgtgtggctggggtcctgactatagacccaccatatgtcatataaacttttcataacaaaaaaacgaaacgaaagcaacgagaaagtagaaaagcacaagatcaccaaagcgaagaataatatacaatttcccaagtaaaaaaaagagcaaacacgagcaacacgcaccaacaggacacaaaaacaaaagagactagcgagagatgcgcgaggcgtagaccaaaaaaaaacagacgacacacaccaacacaaaacacaaagaagaaaaaaacaacaagacaaacaaaccaaaaaacaacagaagaagtaagtacaaaaaaagaaaaaaaaacaaaacagtatctaatctcacagcaacaaaagcgcaccgatcgtaaaatagagaagaaaaaacagcaagcgccggaaaagcgcaagcgcaagagacagagaactaacagagagaagcaacctgacacagccaaacgcataagacaacagacggaggaagaacaaaaaatgacacagagcaactgaacaacacgcgacaccacaagcgagactaaacgaaacagagaacaagacaannn

SEQ ID NO: 22014 - DNA, 472 bp, Homo sapiens
  misc_feature 1, 2, 3, 4, 471, 472: n = A,T,C or G
nnnnccgcctactactactactaaattcgcggccgcgtcgacttctgaaagaacaatacttgtgtcagtggaaaagctggcattttgggaaatgctggtctctctcagtccaggagtcaaggaatatgttgactctctcttaatttttgtagtctcagaggaaacagacattgatgtggaaacagttgtatgccccatggtggaggtggtatccattggagctgtggccttggttttttctgagtcagctaggacagaggattgtgacccatgtccagaactggtggtttccacattagtcgctgctgtgcttgtggaaggatgcatggcttctatagctgtggtgtcttcatctgttgtcagtatctcatgtgaggtactgctcaaatttggaggtgaactggttgtaggttctgggcttgtgcccaatgtgtctgtggtcatcactaggctaggggtgagcagtgaggnn

SEQ ID NO: 22015 - DNA, 13210 bp, Homo sapiens
  misc_feature 1, 2, 89, 13208, 13209, 13210: n = A,T,C or G
nnggcgcacagctgtcggtggcgcttccccgcccgacccgggaccaccgggggcggcggcggcggggggcgccggggcctagggggcgncccgcggcaacgcgtcccggccctgctgcttccccccgggcccccggtcggcggtggcggccccggggcgcccccctcccccccggctgtggcggccgcggcggcggcggcgggaagcagcggggctggggttccagggggagcggccgccgcctcagcagcctcctcgtcgtccgcctcgtcttcgtcttcgtcatcgtcctcagcctcttcagggccggccctgctccgggtgggcccgggcttcgacgcggcgctgcaggtctcggccgccatcggcaccaacctgcgccggttccgggccgtgtttggggagagcggcgggggaggcggcagcggagaggatgagcaattcttaggttttggctcagatgaagaagtcagagtgcgaagtcccacaaggtctccttcagttaaaactagtcctcgaaaacctcgtgggagacctagaagtggctctgaccgaaattcagctatcctctcagatccatctgtgttttcccctctaaataaatcagagaccaaatctggagataagatcaagaagaaagattctaaaagtatagaaaagaagagaggaagacctcccaccttccctggagtaaaaatcaaaataacacatggaaaggacatttcagagttaccaaagggaaacaaagaagatagcctgaaaaaaattaaaaggacaccttctgctacgtttcagcaagccacaaagattaaaaaattaagagcaggtaaactctctcctctcaagtctaagtttaagacagggaagcttcaaataggaaggaagggggtacaaattgtacgacggagaggaaggcctccatcaacagaaaggataaagaccccttcgggtctcctcattaattctgaactggaaaagccccagaaagtccggaaagacaaggaaggaacacctccacttacaaaagaagataagacagttgtcagacaaagccctcgaaggattaagccagttaggattattccttcttcaaaaaggacagatgcaaccattgctaagcaactcttacagagggcaaaaaaagggggctcaaaagaaaattgaaaaagaagcagctcagctgcagggaagaaaggtgaagacacaggtcaaaaatattcgacagttcatcatgcctgttgtcagtgctatctcctcgcggatcattaagacccctcggcggtttatagaggatgaggattatgaccctccaattaaaattgcccgattagagtctacaccgaatagtagattcagtgccccgtcctgtggatcttctgaaaaatcaagtgcagcttctcagcactcctctcaaatgtcttcagactcctctcgatctagtagccccagtgttgatacctccacagactctcaggcttctgaggagattcaggtacttcctgaggagcggagcgatacccctgaagttcatcctccactgcccatttcccagtccccagaaaatgagagtaatgataggagaagcagaaggtattcagtgtcggagagaagttttggatctagaacgacgaaaaaattatcaactctacaaagtgccccccagcagcagacctcctcgtctccacctccacctctgctgactccaccgccaccactgcagccagcctccagtatctctgaccacacaccttggcttatgcctccaacaatccccttagcatcaccatttttgcctgcttccactgctcctatgcaagggaagcgaaaatctattttgcgagaaccgacatttaggtggacttctttaaagcattctaggtcagagccacaatacttttcctcagcaaagtatgccaaagaaggtcttattcgcaaaccaatatttgataatttccgaccccctccactaactcccgaggacgttggctttgcatctggtttttctgcatctggtaccgctgcttcagcccgattgttttcgccactccattctggaacaaggtttgatatgcacaaaaggagccctcttctgagagctccaagatttactccaagtgaggctcactctagaatatttgagtctgtaaccttgcctagtaatcgaacttctgctggaacatcttcttcaggagtatccaatagaaaaaggaaaagaaaagtgtttagtcctattcgatctgaaccaagatctccttctcactccatgaggacaagaagtggaaggcttagtagttctgagctctcacctctcacccccccgtcttctgtctcttcctcgttaagcatttctgttagtcctcttgccactagtgccttaaacccaacttttacttttccttctcattccctgactcagtctggggaatctgcagagaaaaatcagagaccaaggaagcagactagtgctccggcagagccattttcatcaagtagtcctactcctctcttcccttggtttaccccaggctctcagactgaaagagggagaaataaagacaaggcccccgaggagctgtccaaagatcgagatgctgacaagagcgtggagaaggacaagagtagagagagagaccgggagagagaaaaggagaataagcgggagtcaaggaaagagaaaaggaaaaagggatcagaaattcagagtagttctgctttgtatcctgtgggtagggtttccaaagagaaggttgttggtgaagatgttgccacttcatcttctgccaaaaaagcaacagggcggaagaagtcttcatcacatgattctgggactgatattacttctgtgactcttggggatacaacagctgtcaaaaccaaaatacttataaagaaagggagaggaaatctggaaaaaaccaacttggacctcggcccaactgccccatccctggagaaggagaaaaccctctgcctttccactccttcatctagcactgttaaacattccacttcctccataggctccatgttggctcaggcagacaagcttccaatgactgacaagagggttgccagcctcctaaaaaaggccaaagctcagctctgcaagattgagaagagtaagagtcttaaacaaaccgaccagcccaaagcacagggtcaagaaagtgactcatcagagacctctgtgcgaggaccccggattaaacatgtctgcagaagagcagctgttgcccttggccgaaaacgagctgtgtttcctgatgacatgcccaccctgagtgccttaccatgggaagaacgagaaaagattttgtcttccatggggaatgatgacaagtcatcaattgctggctcagaagatgctgaacctcttgctccacccatcaaaccaattaaacctgtcactagaaacaaggcaccccaggaacctccagtaaagaaaggacgtcgatcgaggcggtgtgggcagtgtcccggctgccaggtgcctgaggactgtggtgtttgtactaattgcttagataagcccaagtttggtggtcgcaatataaagaagcagtgctgcaagatgagaaaatgtcagaatctacaatggatgccttccaaagcctacctgcagaagcaagctaaagctgtgaaaaagaaagagaaaaagtctaagaccagtgaaaagaaagacagcaaagagagcagtgttgtgaagaacgtggtggactctagtcagaaacctaccccatcagcaagagaggatcctgccccaaagaaaagcagtagtgagcctcctccacgaaagcccgtcgaggaaaagagtgaagaagggaatgtctcggcccctgggcctgaatccaaacaggccaccactccagcttccaggaagtcaagcaagcaggtctcccagccagcactggtcatcccgcctcagccacctactacaggaccgccaagaaaagaagttcccaaaaccactcctagtgagcccaagaaaaagcagcctccaccaccagaatcaggtccagagcagagcaaacagaaaaaagtggctccccgcccaagtatccctgtaaaacaaaaaccaaaagaaaaggaaaaaccacctccggtcaataagcaggagaatgcaggcactttgaacatcctcagcactctctccaatggcaatagttctaagcaaaaaattccagcagatggagtccacaggatcagagtggactttaaggaggattgtgaagcagaaaatgtgtgggagatgggaggcttaggaatcttgacttctgttcctataacacccagggtggtttgctttctctgtgccagtagtgggcatgtagagtttgtgtattgccaagtctgttgtgagcccttccacaagttttgtttagaggagaacgagcgccctctggaggaccagctggaaaattggtgttgtcgtcgttgcaaattctgtcacgtttgtggaaggcaacatcaggctacaaagcagctgctggagtgtaataagtgccgaaacagctatcaccctgagtgcctgggaccaaactaccccaccaaacccacaaagaagaagaaagtctggatctgtaccaagtgtgttcgctgtaagagctgtggatccacaactccaggcaaagggtgggatgcacagtggtctcatgatttctcactgtgtcatgattgcgccaagctctttgctaaaggaaacttctgccctctctgtgacaaatgttatgatgatgatgactatgagagtaagatgatgcaatgtggaaagtgtgatcgctgggtccattccaaatgtgagaatctttcagatgagatgtatgagattctatctaatctgccagaaagtgtggcctacacttgtgtgaactgtactgagcggcaccctgcagagtggcgactggcccttgaaaaagagctgcagatttctctgaagcaagttctgacagctttgttgaattctcggactaccagccatttgctacgctaccggcaggctgccaagcctccagacttaaatcccgagacagaggagagtataccttcccgcagctcccccgaaggacctgatccaccagttcttactgaggtcagcaaacaggatgatcagcagcctttagatctagaaggagtcaagaggaagatggaccaagggaattacacatctgtgttggagttcagtgatgatattgtgaagatcattcaagcagccattaattcagatggaggacagccagaaattaaaaaagccaacagcatggtcaagtccttcttcattcggcaaatggaacgtgtttttccatggttcagtgtcaaaaagtccaggttttgggagccaaataaagtatcaagcaacagtgggatgttaccaaacgcagtgcttccaccttcacttgaccataattatgctcagtggcaggagcgagaggaaaacagccacactgagcagcctcctttaatgaagaaaatcattccagctcccaaacccaaaggtcctggagaaccagactcaccaactcctctgcatcctcctacaccaccaattttgagtactgataggagtcgagaagacagtccagagctgaacccacccccaggcatagaagacaatagacagtgtgcgttatgtttgacttatggtgatgacagtgctaatgatgctggtcgtttactatatattggccaaaatgagtggacacatgtaaattgtgctttgtggtcagcggaagtgtttgaagatgatgacggatcactaaagaatgtgcatatggctgtgatcaggggcaagcagctgagatgtgaattctgccaaaagccaggagccaccgtgggttgctgtctcacatcctgcaccagcaactatcacttcatgtgttcccgagccaagaactgtgtctttctggatgataaaaaagtatattgccaacgacatcgggatttgatcaaaggcgaagtggttcctgagaatggatttgaagttttcagaagagtgtttgtggactttgaaggaatcagcttgagaaggaagtttctcaatggcttggaaccagaaaatatccacatgatgattgggtctatgacaatcgactgcttaggaattctaaatgatctctccgactgtgaagataagctctttcctattggatatcagtgttccagggtatactggagcaccacagatgctcgcaagcgctgtgtatatacatgcaagatagtggagtgccgtcctccagtcgtagagccggatatcaacagcactgttgaacatgatgaaaacaggaccattgcccatagtccaacatcttttacagaaagttcatcaaaagagagtcaaaacacagctgaaattataagtcctccatcaccagaccgacctcctcattcacaaacctctggctcctgttattatcatgtcatctcaaaggtccccaggattcgaacacccagttattctccaacacagagatcccctggctgtcgaccgttgccttctgcaggaagtcctaccccaaccactcatgaaatagtcacagtaggtgatcctttactctcctctggacttcgaagcattggctccaggcgtcacagtacctcttccttatcaccccagcggtccaaactccggataatgtctccaatgagaactgggaatacttactctaggaataatgtttcctcagtctccaccaccgggaccgctactgatcttgaatcaagtgccaaagtagttgatcatgtcttagggccactgaattcaagtactagtttagggcaaaacacttccacctcttcaaatttgcaaaggacagtggttactgtaggcaataaaaacagtcacttggatggatcttcatcttcagaaatgaagcagtccagtgcttcagacttggtgtccaagagctcctctttaaagggagagaagaccaaagtgctgagttccaagagctcagagggatctgcacataatgtggcttaccctggaattcctaaactggccccacaggttcataacacaacatctagagaactgaatgttagtaaaatcggctcctttgctgaaccctcttcagtgtcgttttcttctaaagaggccctctccttcccacacctccatttgagagggcaaaggaatgatcgagaccaacacacagattctacccaatcagcaaactcctctccagatgaagatactgaagtcaaaaccttgaagctatctggaatgagcaacagatcatccattatcaacgaacatatgggatctagttccagagataggagacagaaagggaaaaaatcctgtaaagaaactttcaaagaaaagcattccagtaaatcttttttggaacctggtcaggtgacaactggtgaggaaggaaacttgaagccagagtttatggatgaggttttgactcctgagtatatgggccaacgaccatgtaacaatgtttcttctgataagattggtgataaaggcctttctatgccaggagtccccaaagctccacccatgcaagtagaaggatctgccaaggaattacaggcaccacggaaacgcacagtcaaagtgacactgacacctctaaaaatggaaaatgagagtcaatccaaaaatgccctgaaagaaagtagtcctgcttcccctttgcaaatagagtcaacatctcccacagaaccaatttcagcctctgaaaatccaggagatggtccagtggcccaaccaagccccaataatacctcatgccaggattctcaaagtaacaactatcagaatcttccagtacaggacagaaacctaatgcttccagatggccccaaacctcaggaggatggctcttttaaaaggaggtatccccgtcgcagtgcccgtgcacgttctaacatgttttttgggcttaccccactctatggagtaagatcctatggtgaagaagacattccattctacagcagctcaactgggaagaagcgaggcaagagatcagctgaaggacaggtggatggggccgatgacttaagcacttcagatgaagacgacttatactattacaacttcactagaacagtgatttcttcaggtggagaggaacgactggcatcccataatttatttcgggaggaggaacagtgtgatcttccaaaaatctcacagttggatggtgttgatgatgggacagagagtgatactagtgtcacagccacaacaaggaaaagcagccagattccaaaaagaaatggtaaagaaaatggaacagagaacttaaagattgatagacctgaagatgctggggagaaagaacatgtcactaagagttctgttggccacaaaaatgagccaaagatggataactgccattctgtaagcagagttaaaacacagggacaagattccttggaagctcagctcagctcattggagtcaagccgcagagtccacacaagtaccccctccgacaaaaatttactggacacctataatactgagctcctgaaatcagattcagacaataacaacagtgatgactgtgggaatatcctgccttcagacattatggactttgtactaaagaatactccatccatgcaggctttgggtgagagcccagagtcatcttcatcagaactcctgaatcttggtgaaggattgggtcttgacagtaatcgtgaaaaagacatgggtctttttgaagtattttctcagcagctgcctacaacagaacctgtggatagtagtgtctcttcctctatctcagcagaggaacagtttgagttgcctctagagctaccatctgatctgtctgtcttgaccacccggagtcccactgtccccagccagaatcccagtagactagctgttatctcagactcaggggagaagagagtaaccatcacagaaaaatctgtagcctcctctgaaagtgacccagcactgctgagcccaggagtagatccaactcctgaaggccacatgactcctgatcattttatccaaggacacatggatgcagaccacatctctagccctccttgtggttcagtagagcaaggtcatggcaacaatcaggatttaactaggaacagtagcacccctggccttcaggtacctgtttccccaactgttcccatccagaaccagaagtatgtgcccaattctactgatagtcctggcccgtctcagatttccaatgcagctgtccagaccactccaccccacctgaagccagccactgagaaactcatagttgttaaccagaacatgcagccactttatgttctccaaactcttccaaatggagtgacccaaaaaatccaattgacctcttctgttagttctacacccagtgtgatggagacaaatacttcagtattgggacccatgggaggtggtctcacccttaccacaggactaaatccaagcttgccaacttctcaatctttgttcccttctgctagcaaaggattgctacccatgtctcatcaccagcacttacattccttccctgcagctactcaaagtagtttcccaccaaacatcagcaatcctccttcaggcctgcttattggggttcagcctcctccggatccccaacttttggtttcagaatccagccagaggacagacctcagtaccacagtagccactccatcctctggactcaagaaaagacccatatctcgtctacagacccgaaagaataaaaaacttgctccctctagtaccccttcaaacattgccccttctgatgtggtttctaatatgacattgattaacttcacaccctcccagcttcctaatcatccaagtctgttagatttggggtcacttaatacttcatctcaccgaactgtccccaacatcataaaaagatctaaatctagcatcatgtattttgaaccggcacccctgttaccacagagtgtgggaggaactgctgccacagcggcaggcacatcaacaataagccaggatactagccacctcacatcagggtctgtgtctggcttggcatccagttcctctgtcttgaatgttgtatccatgcaaactaccacaacccctacaagtagtgcgtcagttccaggacacgtcaccttaaccaacccaaggttgcttggtaccccagatattggctcaataagcaatcttttaatcaaagctagccagcagagcctggggattcaggaccagcctgtggctttaccgccaagttcaggaatgtttccacaactggggacatcacagaccccctctactgctgcaataacagcggcatctagcatctgtgtgctcccctccactcagactacgggcataacagccgcttcaccttctggggaagcagacgaacactatcagcttcagcatgtgaaccagctccttgccagcaaaactgggattcattcttcccagcgtgatcttgattctgcttcagggccccaggtatccaactttacccagacggtagacgctcctaatagcatgggactggagcagaacaaggctttatcctcagctgtgcaagccagccccacctctcctgggggttctccatcctctccatcttctggacagcggtcagcaagcccttcagtgccgggtcccactaaacccaaaccaaaaaccaaacggtttcagctgcctctagacaaagggaatggcaagaagcacaaagtttcccatttgcggaccagttcttctgaagcacacattccagaccaagaaacgacatccctgacctcaggcacagggactccaggagcagaggctgagcagcaggatacagctagcgtggagcagtcctcccagaaggagtgtgggcaacctgcagggcaagtcgctgttcttccggaagttcaggtgacccaaaatccagcaaatgaacaagaaagtgcagaacctaaaacagtggaagaagaggaaagtaatttcagctccccactgatgctttggcttcagcaagaacaaaagcggaaggaaagcattactgagaaaaaacccaagaaaggacttgtttttgaaatttccagtgatgatggctttcagatctgtgcagaaagtattgaagatgcctggaagtcattgacagataaagtccaggaagctcgatcaaatgcccgcctaaagcagctctcatttgcaggtgttaacggtttgaggatgctggggattctccatgatgcagttgtgttcctcattgagcagctgtctggtgccaagcactgtcgaaattacaaattccgtttccacaagccagaggaggccaatgaaccccccttgaaccctcacggctcagccagggctgaagtccacctcaggaagtcagcatttgacatgtttaacttcctggcttctaaacatcgtcagcctcctgaatacaaccccaatgatgaagaagaggaggaggtacagctgaagtcagctcggagggcaactagcatggatctgccaatgcccatgcgcttccggcacttaaaaaagacttctaaggaggcagttggtgtctacaggtctcccatccatggccggggtcttttctgtaagagaaacattgatgcaggtgagatggtgattgagtatgccggcaacgtcatccgctccatccagactgacaagcgggaaaagtattacgacagcaagggcattggttgctatatgttccgaattgatgactcagaggtagtggatgccaccatgcatggaaatcgtgcacgcttcatcaatcactcgtgtgagcctaactgctattctcgggtcatcaatattgatgggcagaagcacattgtcatctttgccatgcgtaagatctaccgaggagaggaactcacttacgactataagttccccattgaggatgccagcaacaagctgccctgcaactgtggcgccaagaaatgccggaagttcctaaactaaagctgctcttctcccccagtgttggagtgcaaggaggcggggccatccaaagcaacgctgaaggccttttccagcagctgggagctcccggattgcgtggcacagctgaggggcctctgtgatggctgagctctcttatgtcctatactcacatcagacatgtgatcatagtcccagagacagagttgaggtctcgaagaaaagatccatgatcggctttctcctggggcccctccaattgtttactgttagaaagtgggaatggggtccctagcagacttgcctggaaggagcctattatagagggttggttatgttgggagattgggcctgaatttctccacagaaataagttgccatcctcaggttggccctttcccaagcactgtaagtgagtgggtcaggcaaagccccaaatggagggttggttagattcctgacagtttgccagccaggccccacctacagcgtctgtcgaacaaacagaggtctggtggttttccctactgtcctcccactcgagagttcacttctggttgggagacaggattcctagcacctccggtgtcaaaaggctgtcatggggttgtgccaattaattaccaaacattgagcctgcaggctttgagtgggagtgttgcccccaggagccttatctcagccaattacctttcttgacagtaggagcggcttccctctcccattccctcttcactcccttttcttcctttcccctgtcttcatgccactgctttcccatgcttctttcgggttgtaggggagactgactgctgctcaaggacactccctgctgggcataggatgtgcctgcaaaaaagttccctgagcctgtaagcactccaggtggggaagtggacaggagccattggtcataaccagacagaattggaaacatttcataaagctccatggagagtttaaagaaaccatatgtacgcatgattgtagggagaaggaaaccagcatctttcactacggatttaccttatggcacccacgctgagtatcacagcagatgacacctggggtccattcctagaaatgctacttaattccccctgtaccaactggacgacttcaattctaaacggccaggtcagtcgaggcaacactatcacatcagcccaatgggactaacccttgttggatcggcctcggtgccaggtcaagatataaacgtcgacaccagatggacaataaggtctctccaaatacgaaaacgcgcgcaactgtaatacgttggcaagaacatccgtagtcttagacatggcgtgcnnn

SEQ ID NO: 22016 - DNA, 1289 bp, Homo sapiens
  misc_feature 1, 2: n = A,T,C or G
nngctcacactcttgcttgttcagattccaagacagaaggcttcacaaggccaacgcctggaaaatgggcatctctccctcccatgttaagctttaacctctgtaatctgcctgtatctataggtgggcatctcactccaccaaaggagcccagcctctctttgtccctctatccatgcaacagtcttctctgtgcatttccccaagctgggccctcttctactctccatttaggcctgttgataactccattacccgcccatcactgctgttcctccagggccagcactcgggcgaggcaggggagctgccttcggtacataatttgaaggggcactccctcttgggcacatgccggccctgagtgcctcccttgcctcactctgatcctggccccataatgtcctcagtggaaggtgatgggggccggtgctgtggggagagtagaaagaggggttggcatgactaaaaataccagtatgtgtattaagtattttgagaatgaaatgccaaggagtgcctactatatgccagctctaggaatggagtagacagtggacacaagaaggacttacgccctgagcacaggtgccaatggtgacaagactggcaagacgtgagggcatgaatggttcattcaggcagctgctgcagatgtggtcacctggtgccatctgctgctcccttttccacttttctatgtcctccttccaccccaagtcccggatcactcgctgttttctggctagctcttggcatctccatctgagcctaaagttgcccactggcaccaatagattctgtttgacctgctgtgcccatgctcatctttgtcggggcttggcttggcagcgagcgaggctggcatggggtgctgaagtggggtctcagtgaggggtgacagcgtgctggcagtcctcacagccctcgctcgctctcggcgcctcctctgcctgggctcccactttggcggcacttgaggagcccttcagcccaccgctgcactgtggggagcccctttctgggctggccaaggccagagcaggctccctcagcttgcagggaggtgtggatcgagaggcgcgagcgggaaccggggctgcgtgcagcgcttgcgggccagctggagttccgggtgggcatgggcttggcgggcctgcactcggagcagccggccggcccttccggccccgggcagtgagggacttggcacccgggccagcggctgcagagggtgtactgggtcccccagcagtgccggcccacctgcgctgggcttgatttctcgc

SEQ ID NO: 22017 - DNA, 2956 bp, Homo sapiens
  misc_feature 2956: n = A,T,C or G
cgcgcctttcttattggataccggcttttcatggggccgagcgccgctgggtaggcggaagcacctgcgggcatggcggcggctatgccgcttgctctgctcgtcctgttgctcctggggcccggcggctggtgccttgcagaacccccacgcgacagcctgcgggaggaacttgtcatcaccccgctgccttccggggacgtagccgccacattccagttccgcacgcgctgggattcggagcttcagcgggaaggagtgtcccattacaggctctttcccaaagccctggggcagctgatctccaagtattctctacgggagctgcacctgtcattcacacaaggcttttggaggacccgatactgggggccacccttcctgcaggccccatcaggtgcagagctgtgggtctggttccaagacactgtcactgatgtggataaatcttggaaggagctcagtaatgtcctctcagggatcttctgcgcctctctcaacttcatcgactccaccaacacagtcactcccactgcctccttcaaacccctgggtctggccaatgacactgaccactactttctgcgctatgctgtgctgccgcgggaggtggtctgcaccgaaaacctcaccccctggaagaagctcttgccctgtagttccaaggcaggcctctctgtgctgctgaaggcagatcgcttgttccacaccagctaccactcccaggcagtgcatatccgccctgtttgcagaaatgcacgctgtactagcatctcctgggagctgaggcagaccctgtcagttgtatttgatgccttcatcacggggcagggaaagaaagactggtccctcttccggatgttctcccgaaccctcacggagccctgccccctggcttcagagagccgagtctatgtggacatcaccacctacaaccaggacaacgagacattagaggtgcacccacccccgaccactacatatcaggacgtcatcctaggcactcggaagacctatgccatctatgacttgcttgacaccgccatgatcaacaactctcgaaacctcaacatccagctcaagtggaagagacccccagagaatgaggcccccccagtgcccttcctgcatgcccagcggtacgtgagtggctatgggctgcagaagggggagctgagcacactgctgtacaacacccacccataccgggccttcccggtgctgctgctggacaccgtaccctggtatctgcggctgtatgtgcacaccctcaccatcacctccaagggcaaggagaacaaaccaagttacatccactaccagcctgcccaggaccggctgcaaccccacctcctggagatgctgattcagctgccggccaactcagtcaccaaggtttccatccagtttgagcgggcgctgctgaagtggaccgagtacacaccagatcctaaccatggcttctatgtcagcccatctgtcctcagcgcccttgtgcccagcatggtagcagccaagccagtggactgggaagagagtcccctcttcaacagcctgttcccagtctctgatggctctaactactttgtgcggctctacacggagccgctgctggtgaacctgccgacaccggacttcagcatgccctacaacgtgatctgcctcacgtgcactgtggtggccgtgtgctacggctccttctacaatctcctcacccgaaccttccacatcgaggagccccgcacaggtggcctggccaagcggctggccaaccttatccggcgcgcccgaggtgtccccccactctgattcttgccctttccagcagctgcagctgccgtttctctctggggaggggagcccaagggctgtttctgccacttgctctcctcagagttggcttttgaaccaaagtgccctggaccaggtcagggcctacagctgtgttgtccagtacaggagccacgagccaaatgtggcatttgaatttgaattaacttagaaattcatttcctcacctgtagtggccacctctatattgaggtgctcaataagcaaaagtggtcggtggctgctgtattggacagcacagaaaaagatttccatcaccacagaaaggtcggctggcagcactggccaaggtgatggggtgtgctacacagtgtatgtcactgtgtagtggatggagtttactgtttgtggaataaaaacggctgtttccgtggaaaaaaaaaaaaaaaaaaaaaaaaaaaaaaaaaaaaaaaaaaaccgggggcagaatcacaatggcgggggtggacggacaaaagcacggtgacagacgaaaacgggccagaggcggccagacaagttgagtacttccgacgcccccacttttctttgtggagcacgagggggaaggaaacagcgggcgggacccccccaaagaggggaggaacgagaataaagatcaggcagacaacacccgggtaagcagctgggattaatagtgatgccgacgggcaaaaggaccagcgaggcacacaaccgcagacaacggcaaactgacgaccgacgaggagcgaaacgacgtcgcgacaatcaatcccacaactgggacagagagacgcgggagacaggacacacacagaaacacacaggaacaccaagcgaagagcacggcgagacgaacaggacagccagcatcacggcaggagtcgggaccagcagacacgaaccgccagaacgtagccatcaggggcaacaaggaggccacagaccaccgcgaaaccgagggtcaaagcgagctacgcgtgccgagagccgcgaagcaacgcggaaccgcacgagaccgaagaacgcagaccaacgcaacacgcagagcgcccacagcgagaccccagtcacaacgatagcaacaagaagaaggagaaggataaaccggaagtacggacgaagaggcacaacatgctcaacn

SEQ ID NO: 22018 - DNA, 1193 bp, Homo sapiens
  misc_feature 1193: n = A,T,C or G
cgacccacgcgtccgggcggcccggccaggcccccggcacttcctcgtcctcggcccgggtgccctgcccccgtccaggagccctaggagtgctacggggggccggagccttgcccgggccgctgccccgtccctggattcggggctggacgcagcaagcggggcgctgtgtccccaagctccccgtcctcggccaggcgggcaccacggcaggggctgagctaccctcatggaagggagaggaccgtaccggatctacgaccctgggggcagcgtgccctcaggagaggcatccgcagcttttgagcgcctagtgaaggagaattcccggctgaaggaaaaaatgcaagggataaagatgttaggggagcttttggaagagtcccagatggaagcgaccaggctccggcagaaggcagaggagctagtgaaggacaacgagctgctcccaccaccttctccctccttgggctccttcgaccccctggctgagctcacaggaaaggactcaaatgtcacagcatctcccacagcccctgcatgccccagtgacaagccagcaccagtccagaagcctccatccagtggcacctcctctgaatttgaagtggtcactcctgaggagcagaattcaccagagagcagcagccatgccaatgcgatggcgctgggccccctgccccgtgaggacggcaacctgatgctgaacctgcagcgcctggagaccacgctgagtgtgtgtgccgaggagccggaccacggccagctcttcaccacctgggccgatgggcctggagttcaaccgactggcatccaaggtgcacaagaatgagcagcgcacctcaattctgagaccctgtgttagagcagctacgaacggaacgcaggtctgaaggacagtggaaaggcaggacacacggactcggtcaagaaagcggcccggcacaaaccaggagcccacacaacaagcggaaaacgacgggaacacaacgaggggcagggaacacgagacaccaacacaaggccgtcccaacggccctgccacgcaccgactcaccaccagccacaggggagagacaacagtacaagaaagacaccgacgcacgacacacccaacacgaccacaacagagggacgacagagccagacagacacaagcagacacaacaccacccacgcaccgcacagagacn

SEQ ID NO: 22019 - DNA, 4410 bp, Homo sapiens
  misc_feature 1, 2, 4405, 4406, 4407, 4408, 4409, 4410: n = A,T,C or G
nncagctttctagatccataaagatttccataggcattagagtcattaccactctgctcctggttatcaatagtaaaattagattggtaaaaatcagagtcaaattgtgccaagtttgacatcctgagattgtgatgctgaagaggctgtatggggagaccacatggagagactgtgactacaagatgagagagaaagagatgcccgattttcaagtccccagctggtcgagtcatcccagttgaggccacagacatcacagaaacaagtcattcctgcctgactttcccaaagtgaccactccactacccggcgccaagacgcgctgatgtcacgacagcgtgcggcgtgcagacgtcggcaagctgcgccgccgcttcgggttgcttccggatctggtacttgggcagagctccccggggttcattgtcttcgcttcacaggatctgtttgagtcctgtccaccggatcctacggggggtaccttcgaaaaaaaacgggctatgctgctgttgcgtgtgggtaccctctcctgacgcctccgccgcccgggtcatgtggaccctcgtgggtcggggctgggggtgcgcacgcgctctcgcgccacgagccactggggccgcgcttctggtggccccggggccccggtccgcgccgacccttggggctgctccagagtcctgggctaccgacaggctctacagctccgcagaattcaaggaaaaacctgacatgtctaggtttcctgttgaaaatattagaaatttcagtattgttgcacacgtggatcatggcaaaagtactttagctgacaggctcctagaacttacagggacaattgataaaacaaagaataataagcaggttcttgataaattgcaagtggaacgagaaagaggaatcactgttaaagcacagacagcatctctcttttacaattgtgaaggaaagcagtaccttttaaatctcattgatacaccgggccatgttgattttagttatgaagtatccaggtcactttctgcttgccagggtgttttacttgtggttgatgcaaatgagggaattcaagcccaaactgtagcaaacttctttcttgccttcgaagcacagctatcggtaattccagttataaataagatagatctgaagaatgctgatcctgaaagggttgaaaaccaaattgagaaagtgtttgatattccaagtgatgaatgtattaagatttctgctaaacttggaacaaatgttgagagtgttcttcaggcaattattgaaagaatcccccctcctaaagtgcatcgcaaaaatcctctgagagctttggtatttgactccacctttgaccagtatagaggtgtgatagccaatgtagcattatttgacggagtggtttccaaaggagataaaattgtatctgcacatactcaaaagacatacgaagttaatgaagtaggagtcttgaatcctaatgagcagccaactcataaattatatgcaggacaggtgggctatctgattgctgggatgaaagatgtcactgaagcgcaaataggagatacattatgtttacataagcaaccagtggagcccttgcctgggtttaaatcagcgaaaccaatggtatttgcaggaatgtatcctctagaccaatctgaatataacaatctgaagagtgctatagaaaaactgactttaaatgattccagtgtgaccgttcatcgggatagtagccttgctctgggtgctggctggaggctaggatttcttggacttttgcacatggaagttttcaaccagcgactggagcaagaatataatgcttctgttattttaacaacccctactgttccatataaagctgtactgtcatcatcaaaattgataaaggaacatagagaaaaagaaattacaattatcaatcctgcacaattccccgataaatcaaaagtaacagaatatttggagccagttgttttgggcactattatcacaccagatgaatacactggaaaaataatgatgctttgcgaggctcgaagagcagttcagaagaatatgatatttattgatcaaaatagagttatgcttaaatatctctttcctttgaatgaaattgtggtagatttttatgactctttgaaatccctatcttctggatatgctagttttgattacgaagatgcaggctaccagactgcagaacttgtaaaaatggatattctactgaatggaaatactgtagaggagctagtaactgttgtacacaaagacaaagctcattcaattggcaaagccatatgtgaacggctgaaggattctcttcctaggcaactgtttgagatagcaattcaagctgctattggaagtaaaatcattgcaagagaaactgtgaaagcctataggaaaaacgttttggcaaaatgttatggtggtgatattacccgaaaaatgaagcttttgaagagacaagcagaagggaaaaaaaagctgaggaaaattggcaacgttgaagttccaaaagatgcttttataaaagttctgaaaacacaatcttctaaataattggtgggaaaacaaagaattttcattgcaatttgtaatatgctgacaacagaaagaaaattataaaatttgcttgttactttcagggtattcaggttcaaataacctactagtctttcgttgaaagggagtagttagtgggtaggcaagagcttagattttgaagccatgttgcctgttctcaaatatctgttccaaccactcactagtaaggtgaccgtggccagattaacctttgtttcctcttcagtaaaatcgagattatactactacctacataagttgttgttgtgaagattaaatgaggtaatacgttaaatattcagaggtgcaagacacatagtaagcactcaattgtaactacagttaagtccttaaatgccatcgaaaggttcttagaaactgactttaagcaaaatgacacgtagcacaatgttcttgaatgatgtcatttccttaagtggtttgtaacatcgatgaggaaaaaaaattggtttatgcgtcatttcattttatttttatttattttttgagacagagtcttgccctgtcgcccaggctggagtgcaatggcacaatctcgactcactgcaacctctgcctcctgggttcaagagattctcctgcctcagcctccattacaggcgtgcaccaccatgctcggctaattttttgtatctttagtagagtcggggtttcaccatgttggccaggctggtcttgaactcctgacctcgtgatccacccgccgtggcctcccaaagtgctgattacaggtgtgagccaccatgcccagccatgtcatttcatttaaagtcacaatttccatgaatctcaacaagtgaggacctgctatattttgttgcatgcagtttttctttacggacactaaaaggccccatacttaagattccatctactttaagtttaaaggattttcagaatcaccttaagtgtcaaatttgttagcaggattaattgatatgaattcacttattaaacagtaaactcaaataacatagacatcaaataacagacatctgctctagttcatgataaaatgttgatagattttatcaggtggttagtttgaaactaaatggtttacatctaaattaagggcaggagctgtctttcagacattcaaaacgcatttgtgtaaaatgacaggtgtttggtattaccaggaactcataatgacattttaataattattgtctaaatttcataatcgaagcgattttagagtagttaacttgagatttcacagccagtaaatggctgtatttctccagagctctcagctcccatgtttattcagccaacgaacaaaccagactgcagactgtattagagcaagacaacatcatttagccattgatttttatcttctaccttgaatgaattgaatgaagaaaatgtcttttagggataaacactatcaaggatgaattttatactaaggttatatgaaagaaaaatctcaaaaccactaagccaaagggaagtcaagctgggaactgattgaggcaaacctgcctcccattttattcctaaataagacagccacaaagataaaatttgctcacaagggaattccttatggacaaagaactcaaagtcttcacatgaaacaaatgcataaatgattgctttctctgtttcatgtttcactaagccagattaaggtataactgactattcctctactctcctctcacatgtaaattgtatattcagtgaaaggctaatcagaaactcaaaatggactttttttctgcagttgaccgctctaatggtgcttaacaggctcaaagtgggcggttcaggaaatgccccnnnnnn

SEQ ID NO: 22020 - DNA, 4417 bp, Homo sapiens
  misc_feature 1, 2, 3, 4415, 4416, 4417: n = A,T,C or G
nnnagactgtggaattcggcacgagaactaccgaaaggaaagaggaagaaaaaagggaggaaaagtaatgaaaattctgaggttattacaccaggttttccccctaaccatgatcagggtgaacagtatgagcataatcgggtccacaaacctgatcgtgtacataacccaggtcattctcatgtacatcttccagaacgtaatggtcatgatcctggtcgtggacaccaagatcttgatcctgataatgaaggtgaacttcgacatactagaaagagagaagcaccacatgttaaaaataatgcaataatttctttgagaaaagatctaaatgaagatgaccatcatcatgaatgtttgaacgtcactcagttattaaaatactatggtcatggtgccaactctcccatctcaactgatttatttacatacctttgccctgcattgttatatcaaatcgacagcagactttgtattgagcattttgacaaacttttagttgaagatataaataaggataaaaacctggttcctgaagatgaggcaaatataggggcatcagcctggatttgtggtatcatttctatcactgtcattagcctgctttccttgctaggcgtgatcttggttcctatcattaaccaaggatgcttcaaattccttcttacattccttgttgcattagctgtaggaacaatgagtggagacgcccttcttcatctactgccccattctcagggtggacatgatcacagtcaccaacatgcacatgggcatggacattctcatggacatgaatctaacaagtttttggaagaatatgatgctgtattgaaaggacttgttgctctaggaggcatttacttgctatttatcattgaacactgcattagaatgtttaagcactacaaacaacaaagaggaaaacagaaatggtttatgaaacagaacacagaagaatcaactattggaagaaagctttcagatcacaagttaaacaatacaccagattctgactggcttcaactcaagcctcttgccggaactgatgactcggttgtttctgaagatcgacttaatgaaactgaactgacagatttagaaggccaacaagaatcccctcctaaaaattacctttgtatagaagaggagaaaatcatagaccattctcacagtgatggattacataccattcatgagcatgatctccatgctgctgcacataaccaccacggcgagaacaaaactgtgctgaggaagcataatcaccagtggcaccacaagcattctcatcattcccatggcccctgtcattctggatccgatctgaaagaaacaggaatagctaatatagcctggatggtgatcatgggggatggcatccacaacttcagtgatgggctcgcaattggtgcagctttcagtgctggattgacaggaggaatcagtacttctatagccgtcttctgtcatgaactgccacatgaattaggagattttgcagttcttcttaaagcaggcatgactgtaaagcaagcaattgtatacaacctcctctctgccatgatggcttacataggcatgctcataggcacagctgttggtcagtatgccaataacatcacactttggatctttgcagtcactgcaggcatgttcctctatgtagccttggtggatatgcttccagaaatgttgcatggtgatggtgacaatgaagaacatggcttttgtcctgtggggcaattcatccttcagaatttaggattgctctttggatttgccattatgctggtgattgccctctatgaagataaaattgtgtttgacatccagttttgacctttcccagtaatcactgttgattacgagaatgttaccatgcagctttgcatctgttccttgtactgtatgcacattgctcaaaggaaagtcagtggcttgcactacttacaagtttcatagatttgagcctaaccacaagaggctggtgcttagtactgttttccctgcacgtaggggtcttttaaaaatataaagcttgtgataaagagaggagaatatgggactccatgaaccagtgttgatatgtttgattaagacttttcacaaaataatcatataaaacactagtctctttattagtagaaacttctgtggctatgcagaaatagagatcgaaccaaaaaaaatcatttaaactttaaaaatattttaaatggactttggggagacattttttgtgtgttttaagaatgaattgtagtgctctttaattcagctacatatattcatgtggtgatagggatcaacttgacacaactttgaaactgcataaagtagacataggaactagaggaaagctcaggctgcattagagtatgaatttagcattgggaaaagcccttattcttgaatctagagttactatttttgtatatatttgcatagtgtttaaacctgcagcctaaactactgaaatttgtgattgtatgtttgtgtgagcttcagtttaatgaaagattcataatggttctttgtattattataatacttggtgttggggtgttctttctgttttgttttttactttaattttgttttgattttttttttttttttttggcgggggtaggtgagggtttggagcatgtggtctttttaaaaaattgtaaccctctagaaaatatcaaagaaatgaaccagacgtggtttaaatagttgattttcctattttaacagtaccaactagttaattgggaaatgtaagttctgaatgttcacattgctttaccagtttggcactggaaccaagagcacatgtcgtggctggctacaaggttgtaaagcagaaaatcgaagtttaccatgtctgtaatgtgtacatgaagtgtcaatttagaacagttactaggataaactccattattgccatggctgtcatggtacccaagtgacttggaagatgcatttaaattactcagctgaaatcacttgatcatcttgtgccaagatatgctgttggtgcctgatagggattagtcttttaggtgccctgttctcctaccataattgtgaatgatttgtgagaagtgcaagccatgtttatcctgaatttttacttaataatttgtattactagtcatatgcatgtagctttctgtttacatcctatgccacatggtcttcatttatgccaggtaaactgtatttgaactatgtgcagctagctttgttttaatctgcttggcaaccagtgtagctgctgtaacaatctatcttattgttcaaatatataagagccaaactcttttccattccatctaaaatgttttcatttagtactcttctttcctcctactctatgaacttcaaaacaaaaacaaaactttgagagcagcacatgcatccaggtatttatagattattgccagtgtcttttctgtatgctataagcaagggagcttaggtgttatttctttaatttatgcttgaatctgaaaaattatttctgacttactccatggcctccttataataagtagaagttttatatataattaattttcagcattgggcactgaattaggacagtcctcatctcattgcttggcccttcaagcaacctagctaaaaggtgctgatattttatttagtactgccaacttcaagtgatttagatatctatctatctatctagatttctgaaccaagatatatttatagttcacttttgggtttttatacccacggtaggattctgcattccagcattaaatctgcttcattttagaacctttataaaagcaatagctggaatatactcccagttttaaaataaataaatgcctgattgatttaaagcaagtaggttatgctgaagtatataaagaagttttatattctctcaaaaatggtattatctttctttatttgctagattcttacaaatcttttaagagggctgtaacagttgctgctagtattagggttccacatcattctaatgtatagtttcaagtcttaatagacaatctgaattccactacatttcttttggctccaacattccttttagcttgaccagtctaatttaaaatgtgtttgttggaggtccataacgttactggtccacgctgtccctgggtgcctcctatgaatcgggtaatcaagccacaaacaacacaatggggttacacaacacgcgggaggaggaagctcaaaacaaatgaaacaaagaaacgggagtaccacacaaaaacaacaccggggctacgtaatgtaccgccggggcgaggaaaaccaacaccggggcagggagacaccacaagagacacaagccctcacaagcaggagcaactggcgacacactaaaaaaaaacccaacgacacagcagatgccaactccaacctannn

SEQ ID NO: 22021 - DNA, 2844 bp, Homo sapiens
gcaagttccgcctaccagattctggtgattcttgtgcctcagcctcccaagtagctgggattgcaggcgcccaccaccacgctcaggtaatttgtgtgtgagtgtgtgtctatgtatatatatatatagagagagagagagagacacacactcacatgttttggggtttttttgttttgttttgtttttcttgagacagagtctcgctgtgttgccaggtgagtactgtggcgtgatctcggctcactgtaacctccctctcctgggtccaagcgattcttctgcttcagcctctggagtagctgggactacaggcgcgtgccaccaagcccagctaatttttgtagttttagtagagatggggtttcaccatgttgggcaggatggtctcaatgtattgactttgtgatccgccctcctcggcctcccgaagtgctgggctcacaggcgtgagcccccgcgtccagccccatctgcatttctgtgatgtctgtgtaagttctgggtcccagctgggagccggaagttacagtctgcttgcgtcgctgtttgacctgtagaggggccttatctcgctctacgaacttgtttcttattgggagagtgttttgtggttggcttttaacctcttgttctgattctagtggaatcccccaaagaaggtaaagggagcaagccttccccactgtctgtgaagaacaccaagaggaggctggagggcgccaagaaagccaaggcggacagccccgtgaacggcttgccaaaggggcgagagagtcggagtcggagccggagccgtgagcagagctactcgaggtccccatcccgatcagcgtctcctaagaggaggaaaagtgacagcggctccacatctggtgggtccaagtcgcagagccgctcccggagcaggagtgactccccaccgagacaggcccccccgcagcgctccctacaaaggctctgagattcgggggctcccggaagtccaaggactgcaagtacccccagaagccacacaagtctcggagccggagttcttcccgttctcgaagcaggtcacgggagcgggcggataatccgggaaaatacaagaagaaaagtcattactacagagatcagcgacgagagcgctcgaggtcgtatgaacgcacaggccgtcgctatgagcgggaccaccctgggcacagcaggcatcggaggtgaggcggggttgcagtgactggtggccgcaagcccttccctggggagtacctgatggctgccctttgacccccggtggctgccctttgacccccgggtgtgctctcagcgcaagtggtcctagaacaggattctttttggaaatgtctgtcgactggaccttggtggatttggaaatggaactgagggaccggtgacacgtgcttcagaccggtctggggtgcggcgcacacctgggcccgtgcagggctcagctcggcagcagctctgagggcagctcaatgaaaaagtgaatgcacacgcccttgttggcgtggcctggcatggcctggtgctatcggcagccgctctccactccccgactgatactcaattacgtgaagccaagaaagatgatttttagaacctttgcctatattaggttgtacttatgtacatattttgcagtgtttcacaggagaaagtggccttaactgccccttattctctctccacgttgtaaataaacatgtgtttaatacaagttaaagctatgtatgaaaactcagaacttgaatcccgtcagcttaaaacttgtgtagggaatcctgacttttaaaatgtgagggtatttggatctgtgttgaaagtcgtatatttttatctgtgcggtgctgagtgcaggccaccagctcctaaatagaggttccctatatgcgcgtatgacatggtgaataaacacaactctctccactcaggacatccggagcgttatggacgtggtaggtggtcgttctgtgtgcttgtgaaagtgtccaggcgtgtgcacagccagtgcgcccacttccgggctccttgctccctgctgtactgaagttttggattttgcatccaatcctgtgtgcctgcccttctgccgaaggcttgtgaggggcctgagtcctctgcccatcaggatgacaggctccttcctgcagggccataggagggaagttttggaaacacagaatgattccaaggtgctctcgttcctgagggggactggtttgtaacccatgacatctgtgggcgagagaggcagctgggagcaggacacttggagggtcaccccacgggggtggcacctgcactctgagtgccccccactgtcatcagctgcctcttaccgtggacacagttttggttttggggactagggggccccactcctggtggtaccgtttggacttactagggcagtgggacatataggccggggctagtgggataacggggagttacgcctgatgactttttttgatggaatcctgcattagatagctggtgggaccccccctcagaattggggaactgaggagactccagggagggtgtccttccagggagagcagctatgaggggccccctagcttcctgtgcctggaagtaagagaaccagtaaagggccatacacacctgtacccaagagaccgctctccatttgctttctttttttactaaataattgtaaaatattattatgacataaagaaccatttaaggccaaaaaaaaaaaatcacaacaaacttgacccctcttttctcctaccgtccactctccctctcttctggccccttcccctctaccctctatcatcatatctctccctccccctttctctgttc

SEQ ID NO: 22022 - DNA, 1187 bp, Homo sapiens
  misc_feature 1, 1179, 1180, 1181, 1182, 1183, 1184, 1185, 1186, 1187: n = A,T,C or G
nagtggatcccccgggctgcaggaattcggcacgagtgagaaggagtttcttaatgagtttacacgtttaaatcaagcatattataagttatatgccatgtgttgaaggcttgtctatgtatatatataaagatttttagtatgtgtgtttagtgtccttgtgttgcaataatttaactcctttgactcagttgctgaaaatatttcttctattaagaagtgctcttgacttcaacacccaaacactgaaaatcatgtcaatgttacccaaagataagtttttatacagatacacaccttataagttctgatttattttcttactcattatgctgtgttctaaataaatcatgaatgagaagagtgctttattgtgaaattatttaaaactgtcctttaaaagaaaaagaggaaacgatgaacaaaaactaatctaattgccaagttagaattcattatttaatttacctcctatgcaatgattaatgctgcaaaatgtatggttatgttaccgtatattcacaaaagaaatattattacaaggtttcagaggtagccaattgcattcttttggaaatttactgtactgtttcaatgtgttaagtgccttgttgtaaagtaaaattttaagtctagattcattattttcctgacatatatttttcattatgatatctactgtatgctattgtgatagttttatgaaatgcttacattttaatcaaatatgtaaatttcagaagctcttttttcctacccaccagtaccttaatcattggtttatcacattggattcaaattcaggttccttttttgataaagaggaaatttgttttccatgcttgtgattttgtgtttgtaaacatttcaggaggaatttaggagtgtaactatagtttatacttctataatgttgtcttacatttacatttttaagtgcctaattgttaaaactgatttatgtttctcttctaaagaggatatgtgtacttggtttctaatctctttggttttgctttttaaaaaatgcaagagcctatactttgtatttacctaataaaccacagtgacatcaacagtcttttcggaaaaccaaaaaaaacaaaaaaaaaaaattggggggggcgggccggaaagtttttaaccatttgtggggggggccaaggatgaaaggacaannnnnnnnn

SEQ ID NO: 22023 - DNA, 4240 bp, Homo sapiens
  misc_feature 1, 4239, 4240: n = A,T,C or G
natgtcgggatcgtttacactcctgacacgacccacgcgtccgggaggatcgggagtcgcgggaggatgggccgccgctaggctcgcactccggacgcgcctcgcagtgcgcagggtgggtgccccgcgcctgcagcgtccgccggggcggcgcggcgggaggtggccgacaggctccgggcctcgcagcctcagcccccggcccagcgcgctttccgacggcggcgccgcgccgagccacccgcccgcccaaggtctctcgcgggcgggagaacggaaaactcccaacttcctgagttctaaagttcctgttgcttcagacaatggatgagcaatcacaaggaatgcaagggccacctgttcctcagttccaaccacagaaggccttacgaccggatatgggctataatacattagccaactttcgaatagaaaagaaaattggtcgcggacaatttagtgaagtttatagagcagcctgtctcttggatggagtaccagtagctttaaaaaaagtgcagatatttgatttaatggatgccaaagcacgtgctgattgcatcaaagaaatagatcttcttaagcaactcaaccatccaaatgtaataaaatattatgcatcattcattgaagataatgaactaaacatagttttggaactagcagatgctggcgacctatccagaatgatcaagcattttaagaagcaaaagaggctaattcctgaaagaactgtttggaagtattttgttcagctttgcagtgcattggaacacatgcattctcgaagagtcatgcatagagatataaaaccagctaatgtgttcattacagccactggggtggtaaaacttggagatcttgggcttggccggtttttcagctcaaaaaccacagctgcacattctttagttggtacgccttattacatgtctccagagagaatacatgaaaatggatacaacttcaaatctgacatctggtctcttggctgtctactatatgagatggctgcattacaaagtcctttctatggtgacaaaatgaatttatactcactgtgtaagaagatagaacagtgtgactacccacctcttccttcagatcactattcagaagaactccgacagttagttaatatgtgcatcaacccagatccagagaagcgaccagacgtcacctatgtttatgacgtagcaaagaggatgcatgcatgcactgcaagcagctaaacatgcaagatcatgaagagtgtaaccaaagtaattgaaagtattttgtgcaagtcatacctccccatttatgtctggtgttaagattaatatttcagagctagtgtgctttgaatccttaaccagttttcatataagcttcattttgtaccagtcacctaaatcacctccttgcaacccccaaatgactttggaataactgaattgcatgttaggagagaaaatgaaacatgatggttttgaatggctaaaggtttatagaatttcttacagttttctgctgataaattgtgtttagatagactgtcagtgccaaatattgaaggtgcagcttggcacacatcagaatagactcatacctgagaaaaagtatctgaacatgtgacttgtttcttttttagtaatttatggacattgagatgaacacaattgtgaacttttgtgaagattttatttttaaacgtttgaagtactagttttagttcttagcagagtagttttcaaatatgattcttatgataaatgtagacacaaactatttgagaaacatttagaactcttagcttatacattcaaaatgtaactattaaatgtgaagatttggggacaaaatgtgagtcagacactgaagagttttttgttttgttttaatatttttgatattctctttgcattgaaatggtataaatgaatccatttaaaaagtggttaaggatttgtttagctggtgtgataataatttttaaagttgcacattgcccaaggctttttttgtgtgtttttattgttgtttgtacatttgaaaaatattctttgaataaccttgcagtactatatttcaatttctttataaatttaagtgcattttaactcataattgtacactataatataagcctaagtttttattcataagttttattgaagttctgatcggtccccttcagaaatttttttatattattcttcaagttactttcttatttatattgtatgtgcattttatccattaatgtttcatactttctgagagtataatacccttttaaaagatatttggtataccaatacttttcctggattgaaaactttttttaaactttttaaaatttgggccactctgtatgcatatgtttggtcttgttaaagaggaagaaaggatgtgtgttatactgtacctgtgaatgttgatacagttacaatttatttgacaaggttgtaattctagaatatgcttaataaaatgaaaactggccatgactacagccagaactgttatgagattaacatttctattgagaagcttttgagtaaagtactgtatttgttcatgaagatgactgagatggtaacacttcgtgtagcttaaggaaatgggcagaatttcgtaaatgctgttgtgcagatgtgttttccctgaatgctttcgtattagtggcgaccagtttctcacagaattgtgaagcctgaaggccaagaggaagtcactgttaaaggactctgtgccatcttacaaccttggatgaattatcctgccaacgtgaaaacctcatgttcaaagaacacttccctttagccgatgtaactgctggttttgtttttcatatgtgtttttcttacactcatttgaatgctttcaagcatttgtaaacttaaaaaatgtataaagggcaaaaagtctgaacccttgttttctgaaatctaatcagttatgtatggtttctgaagggtaattttattttggaataggtaaaggaaacctgttttgtttgtttttcctgagggctagatgcattttttttctcacactcttaatgacttttaacatttatactgagcatccatagatatattcctagaagtatgagaagaattattcttattgaccattaatgtcatgttcattttaatgtaatataattgagatgaaatgttctctggttggaacagatactctctttttttttcttgcaatctttaagaatacatagatctaaaattcattagcttgacccctcaaagtaacttttaagtaaagattaaagcttttcttctcagtgaatatatctgctagaaggaaatagctgggaagaatttaatgatcagggaaattcattatttctatatgtggaaactttttgcttcgaatattgtatctttttaaatctaaatgttcatatttttcctgaagaaaccactgtgtaaaaatcaaattttaattttgaatggaataatttcaaagaactatgaagatgatttgaagctctaatttatatagtcacctataaaatgttctttatatgtgttcataagtaaattttatattgattaagttaaacttttgaattgatttgaggagcagtaaaatgaaagctatatctattctaaaccttatttagacattggtaccagttacccaggtgaaaatatggagtaactttgttttgtatggtaaggtttaggaatggtggatgaagggtatctctatataaataaagtgctcaacaatgtgcaatgattgtaaatttagtaagatattacagccatttcatgaatgctttaccattcaacatagtatctattacaaaacacctttcttgtatccatatacttcaggtgttgctgttaacatttactatgatatttattttaaccaaaatgttactcacattaaatgtttattctttaaaatgaatgtattatgtttttaacccacaaatgcatacttaccctgtgcctcatatttcaatagtactgtaatatggacatcttttgtgaaatacttttattttgttatgctttaaatatacatacaaaaagatttctgttattagctttgaaaattgtataatatcctaatataaacaaaaatataaaaataaaaatgaatacagtaaaaaaaaaaaaaaaaaaaaaaaaaaaatgttgtggcggcctggcctggaaaggtttttaaaacacacgggtgggggggcgggcccaggtggttagggaagggggcaaaacnn

SEQ ID NO: 22024 - DNA, 3930 bp, Homo sapiens
  misc_feature 1, 2, 3903, 3904, 3905, 3906, 3907, 3908, 3909, 3910, 3911,3912, 3913, 3914, 3915, 3916, 3917, 3918, 3919, 3920, 3921,3922, 3923, 3924, 3925, 3926, 3927, 3928, 3929, 3930: n = A,T,C or G
nnacggacgacaccagttcggtgacctcctctgccagctccaccacttcctcccagagcggcagcggcacgagtcgcaaaaagagcatccccttgtccatcaagaacttaaagcgcaaacacaagaggaagaagaataaaatcactcgagacttcaagccaggggacagggtggcagtggaggtggtgaccacgatgacctcagccgacgtgatgtggcaggatggctccgtggaatgcaacatccgctccaacgacctcttccctgtgcaccacctggacaacaacgagttctgccctggagacttcgtggtagataagcgagtccagagctgtccagaccctgctgtctacggtgtggtacagtctggggaccacatcggccgtacctgcatggtgaagtggttcaagctgaggccgagtggggacgacgtggagctgattggagaagaggaagatgtgagtgtttacgacattgctgaccaccctgactttaggttccgtacaactgacatcgtcatccgcatcggcaatactgaggatggggctcctcacaaggaggatgagccatcggtgggccaggtggcccgtgtggacgtcagcagcaaggtggaggtggtgtgggctgacaactcaaagaccatcatcctgccccagcacttgtacaacatagagtctgagattgaggagtcagactacgattcggtagaaggcagcaccagcggggcatcctcggatgaatgggaagatgatagtgacagctgggagacggacaatgggctggtggaggacgagcaccccaagatagaggagccccccatcccacccctggagcagccggtggcccctgaggacaagggagtggtgatcagtgaagaggcagccacagctgccgtccagggggctgtggccatggctgcccccatggccgggctgatggagaaggctggcaaggacgggccacccaagagcttccgggagttgaaagaggccatcaagatcctggagagcctcaagaacatgactgtggagcagctgctgacgggctcgcccacctctccgactgtggagcctgagaagccaactcgggagaagaagtttctggatgacatcaagaagctacaggaaaacctcaagaagaccctggacaatgtggccattgtagaggaggagaagatggaagcagtgcccgacgtagagcgcaaggaggacaagcccgaggggcagtcacctgtgaaggctgagtggcccagcgaaaccccggtgctgtgccagcagtgtggcggcaagcctggcgtcaccttcaccagcgccaagggcgaggtcttctccgtactggagtttgcaccctcaaatcattcttttaagaaaattgagttccagcctccagaagccaagaagttcttcagcacagtgcggaaggagatggcgctgctggctacctcactgcctgagggcatcatggtcaagacttttgaagatagaatggacctcttctcagctctcatcaagggccccactcgaaccccctacgaggatggcctctacttgtttgacatccagctccccaacatctacccagccgtgcccccccacttctgctacctctcccaatgcagtggccgcctgaaccccaacctgtatgacaatgggaaggtgtgtgtcagcctcctgggcacctggattggaaaggggacagagaggtggacaagcaagtccagccttctccaggtgctcatctccatccaaggtctgatcctggtaaatgaaccatactacaacgaagccggcttcgacagtgaccgaggcctgcaggaaggctatgaaaacagtcgctgttacaatgagatggcgctgatccgcgtggtgcagtccatgacccagctggtgcggcggccccccgaggtctttgagcaggagatcaggcaacactttagcactggtggctggcggctggtgaaccgtatcgagtcctggctggaaacccatgccctgctggagaaggcccaggcactgcccaacggggtgcccaaggccagcagctcgccagagcccccagctgtagccgagctgtcagactccggccaacaagaacctgaggatggagggccagccccaggagaggcctcccagggctcagactcagagggcggtgcccagagcctggcctcagctagcagggaccacacagaccagacttcggagaccgcaccagacgcatcggtgccacccagtgtgaaaccaaagaagcggagaaagagctaccggagcttcttacctgagaagagtggctaccctgacatcggcttccccctcttcccactttccaagggtttcatcaagagcatccggggtgtcctgacgcagttccgggctgccctgctagaggcaggcatgccggagtgcacagaggacaagtagctgccaggcacagaggaaagagcatcaccgtgggagaggccagccgccgcctgctcactcccccccggaatcacccctcttcccatgcccctctgtccccactgcaaacccactgccctcttctccccaaggtgagtttgatgctgaagtgcaagaagtgtgttgagatgctgccgtttctattttgaagcgagctttcaacaggcgggtcccctgtggcaaagaaaatcggaaccctgttgccgattttccatttgtcaccccagcagaatgtccggcacttgctcccttgctgccccttctcaggtcagaggcgggtgttccagggcctgccgcggggctctctgggccggttccctgcagacccgcaggagagcacatgtgccttgcatgaagtgtgggttgcgccaacaattcccctggtccctttcaacctgtttagttcaactcaagcctccctgtgtcccagaccctcctgctgccaccaccacccaggtcctccctagtcctccagcgtcaacactatcccttgggagttgtagctgctgtcactgactcccggctatacatggcctgtcgaccacgttatagccctcaggcctgttgaacttgctctctaagagaggttgggaccaggctaggttccgggtgacgcccaggagaggtggtggccttcacacatgcacatggagttgaggaccagggagctgcagggaaagcaacagctataggtgccttgctcttctgtcggaggctgctgggggcaagagcagctgcacaaggccagggcaagtgctagggcccctcccccatcacatggtcacactgggacaggcgtgcagctcactgaactccaagcgagccagccctctcttggactagaaggcctactgtcagcccttcgcttacaaactgcaggctcaatccgaaggggacggccggcgggggctctcctagtgcccagagacaggcccagaggtttacaagttttctaagcttttgataatgtgaagctccaggccgagaggatgctgttgagcacattgcagctatgtaatttttggtgtatgtatgtaatatttaaggttggaaaaaaaactcaaaagcaaagatattaactcttattagaaaaaaagacaaaaaaaaagccaaagcatgatgcgtcttgtcagccttaagtgggctccacacctgtgctgtgctgtgaccgcccagccagcagagctgcgggaggatggagccggaccacacaccgtggcatttggaaccgagtcggtatcttgtttgagaaacacccggagtgactggtggggctgtgcttcccagtgcattgtacatgtggagatgtgaatgcctactgcttacgatatctgtataaagtgctgtgtgattaaacttttttttacttgcattttttttttttttttttttttgttggctcattagcaagacaaggtgacaccattaaacctccctctgccannnnnnnnnnnnnnnnnnnnnnnnnnnn

SEQ ID NO: 22025 - DNA, 1187 bp, Homo sapiens
ccgcggtggcggccgaggtacgcgggggctgactctcttttcagactcagcccacttgcacccaagtgaattaacagccttgttgctcacacaaagcctgtttaggtggtcttctatacggacatgcttgacacttggtgccaaaatctgggccagggggactccttcgtgagaccggccccctgtcctggccctcattccgtgaagagatccacctgcgacctcgggtcctcagaccagcccaaggaacatctcaccaatttcaaatcggatctcctcggcttagtggctgaagactgatgctgcccgatcgcctcagaagccccttggaccatcacagatgccgagcttcgggtaactcttacggtggaggattcccagccatatgaagacaccctagctggacgatcagtccttgtcaaaagtctgacccctcaaactctacagcctcaatggaccagaccctacccggtcatttatagcacaccaactgccgtccatctgcaggaccctctccattgggtttcaccattccagaataaagcccatgcccatcagacagccagctgtgatctctccctcttcctcctggaaaggtcacaagattaggcccgagcagcccgatcagacaaacaacactacaacccttaagctcctggcagcgccccagccaaggccatgcttccatgcaacactcctcccaaatggccgtcccagcatgcttccaagcaggcttcatccgttcctctggaccctcatctcttaggacctgccgcctataaaaaggattatatcttgagaccctatcctctaaaattttttccacacccaaaacaaaaaatctctgggtcaaaagtctaaaacgcttaggctggcaaccatcagatccttgcccatggtgtcctcaagcctactctcatgaaatggacaacagtacacgcatatggggccagttccacatatttggcaaccagaccagcatccaggacaacacaaagatctgcaatcagaactattgaacttctccattcagaccgccactcacacctatgggaaaagggtaatgtatcatcggcttagcaacagggaatactattcgtatgatggaaaatggggacaaaaggctttggtacataaaacattattccttccttggcctaaaaactcatcgccacctacattaaagc

SEQ ID NO: 22026 - DNA, 360 bp, Homo sapiens; identical to SEQ ID NO: 12735

SEQ ID NO: 22027 - DNA, 249 bp, Homo sapiens
aggtatcccttcgtttgctgtcctttgtagacagtagagctaggacccatgggatgtagacacacaagaatgcccctcaacattttcatttactgtctacttttagttatctttttatgaccctccctctcttcttcatggaaaagtaaaacagagtggaatagggtgttctgggtgctgaatatcctcttagaggcagaataaaatcagagcggacgcgtgggtcgactcaagctagcacctgcccgg

SEQ ID NO: 22028 - DNA, 1084 bp, Homo sapiens
  misc_feature 1, 2, 1076, 1077, 1078, 1079, 1080, 1081, 1082, 1083, 1084: n = A,T,C or G
nnacaatttttggactcaagcaaaaagccagattttttggaaccaactgaggaattctgtacacaaagcttcagcaaacacttagagaaaacaaacaaacaaacaaactgggtccttggaaacagttctggcacacaggcagaacactggaggccacctcaaaggacagaggccatgctttcgcatttggaatgtggctctgccacacagctcactcctatggtggggtcagaggtcagaacacaaaccacccatgtgggctctgctccctcccaacactctgtgttcccacagggcttctctgcgggcagccaggcacctgtcaggcttgggcaggggcctgctgagaatctgtgaatgcagaggggagggctcatggccaggattccagccagagatgaatttccatgctctgggccagggctctgtgccggcccctcatgaggtggctggctgcattatggggagatgctgcccacggcggagatggtggcagtggctgtgaagaacagaggtacctgaattctgtgtcctcagctgtcactttccggtgagacaagtggagcagggcctttgatcactgtggtcacagacctggtactgggttttgcccttgtgtgctcaaacatttctaaggtgtcccaagccctggaaatagggaagggaagggtggaggcttggatctgaggtcttgctgtccactccctgcctgctgcccgatctcaggcatggcaacagcagccgttgaggggggttgtctggacagttgcgtgtgatggtgttgagccatcacaggcagaggtcacttgtgtcacccccatagtcattgcgtggaggccatggaggagggacctccaactccatgggggcctattctccattacggggagtgtccactgtgggcctagccacggcaggacccaggcccgggtcttttcatactctggcggccggcagctccgctgcggcggtggctgggggggtggctggaatcttcttataagggtctttttcttggttccaatggcctgccggaccttggaaaatggtggggtgagggccggggcctggcatcnnnnnnnnn

SEQ ID NO: 22029 - DNA, 486 bp, Homo sapiens
  misc_feature 486: n = A,T,C or G
gtccggattgtaccaagcaccattcaattaaacaacttcagctttctccaagacttctggaagtgacaaacacaatcagggttgaaaacctgccgcccggtgctgatgactacagtttaaaacttttctttgaaaatccctataatggagggggaagagttgccaatgttgaatattttcctgaagagagttcagctctgattgaattttttgacagaaaagtgttagacaccatcatggccacaaaactcgacttcaataaaatgccactttctgtgttcccatactatgcctcattgggcacagccttgtatggaaaggagaagcctctgatcaagcttccagcaccatttgaagagtcactagatcttcccttatggaagttcttacagaaaaagaatcacctcattgaggagataaacgatgaaatgaggcgttgtcactgtgagctcacgtggtcccactcagtggtaaagttaccatcan

SEQ ID NO: 22030 - DNA, 1818 bp, Homo sapiens
  misc_feature 1, 2, 3, 4, 5, 1817, 1818: n = A,T,C or G
nnnnngcaggtactttttccttcttccgttttcaaaaataaccgcctatcagtcccgggagagctgaggatagcaggattttccttgctgcccaaagaagcctgagttgtcttttccatccccaaaggaggacaatgtgattcggaaatcttctgggttttgcttttgtgaattgtttttttatcggatagtttcaactggcggggaccataattcccccattaaagtcagccagtgctgtggccaagtcggttaacccccttggatgttagtttctttctcggtaaaatggagcaagttcccaccttgtagaactagtgccaggataagaaatcatatttgtggattgcctggcatataaaaaggattcagtaagaaataggtatgattaataaactggaatgcatacttactggtgtgaggtctttaaagatgctaccaaaaacaaaaacaaaaacaaaaacaaaacacccaaaaaacccaaagaaagaaagaaaagaaagtcacagcagctgcattggataccaagatgctaaatcaaccaaagctgggtcttcatataatgaacttatttgttggaaaaatggcaccttgcttttcatacttcttgtgttatgtttggcctgcctaactttaagctactattttacaacttcatttaatgtgctgtaacattagcagacgttatgcacctttgctatactatgtcatgattccagctccctaatcctttcctggaatctttctccaaccagactggtgtggaagaggccagagtttcacataatttctctccaagctgtacctgagatgccactctaacaggcagcataggaaagctgggtcccgatctgaactgcatagggtcaggttgccaaacctaaatgctttttaaaaaagaagaaaaagaatgatttgccaggcacggaaaacgtggagcctcccaggggatggcttctggagcttggtggcaggtggccatggtaagggctgggatgtcttctccactccgatattgctgcccgtttagtctatggagggagctttcctcaacaagggtcaggggtcagcctttattgggtctgcctgaatctttagagctgtctcacttttcaaattaactgtgaggaccacccaaggtagttatggtccaccaaaataccctttccccatgaggtggaggaagggctaggggagctcaagcaactgggaagccctgagggagtagcagtttctgtcccgtgtatcccactgccccagagcccaggcaggaagaggcatgactgggtcttggcgtccagatagcctcagatatcctcagtgatgagcctcagcttttctgtgaatgctagaaaccactgatacatcattagctgaagtatcattagtttgcattttgttcattcacttattgattgatcaatttaccctttatttgttgtgtgttttgtgcagagcacagccttggtgcctgtgttcgttgtgaaagattttgcttgcagatgattcttggtttgaattccagccttgccacttactaatccctgaatcagttttcctcttttgtaaaaggctgttttacaactctctttccccaggttgtgaaaagatgaaatggcataatacaggaacatgatccagcataaagttggaagcatgtttgtctgttaaatgggaactatcattattttcttcagtggtaaatgagacataatctgtccccactctacgttgtactgttgggtgaatggttggttcttctaatgggccctggggaaaacaaacctttcttacctttgaatcattagtagccctcnn

SEQ ID NO: 22031 - DNA, 610 bp, Homo sapiens
  misc_feature 606, 607, 608, 609, 610: n = A,T,C or G
acagaactggggcataaaaatggcctatatctgaaaataactccaaaaatttattattaaaattaatttcatttgcttctttttaaatttttttcatgtggctactagaaaaattaaaatgacagatgtggctcacattatatggctactggacagcactgatataaattatgcttttcatagttttatcataaaggggaccagaagatgggatggtagctggtggtgaagtggggtaaagagaaacttttttcccctgaaatgggagaattgcagcatgtttgtatgtgggaataatatagtcaaaagtagaagttggtgatgcagcagaagagacaggggacaaatgatgtcctggagtaggtgagtgcatttgggttccagcgcataggtggagggtggccgaagggttatggactgttcatacagagtgacaggagaggaagcagaatgtgaggtttgcaaacaaaggtgagtatttatggacatgggagtgcttggaagttcctcttttgtaatcttagtgacatagggagccagtcttcagctgagaaaagaggatgggggaggaggttctcttctgacatacactatagaccacagaannnnn

SEQ ID NO: 22032 - DNA, 515 bp, Homo sapiens
acagctggcaagaatccagggcaacgtggttccctcgctcacggtcccggaaatgtccagggaagcaggtctgagcctgctgctgttagtgcattcagtcgcctgcctcagtctctctgtagagcctgcccgcgtacagactatttagttgttgagaaaacaggggcgtttcctaatttggtctttatcctgcgacaacactttcagcagactagcctctccttatctcacagatcacaagcacccctagatagtgtgattctgtcagatagcatttatgcaaaaatctatgaagttaaaagatcgtagaagccaaatgaaatgtacacaaaaggttttttttttttttccttttaaatctaccatactgcttcagttcatttccaatgcaacaatctactcaacaccaaaaatggtcatatctatcataaatacagaaagtcagtttttaaaacttattttttttaagctacaagtcctcaacactctttgtgtgtgtgggttattattttttt

SEQ ID NO: 22033 - DNA, 5293 bp, Homo sapiens
  misc_feature 1, 2, 3, 4, 5, 210, 268, 424, 436, 445, 482, 488, 5292, 5293: n = A,T,C or G
nnnnncgaatccggtagtaaaggagggaaccccattcattttctacctttggggctcctcttctgcatgaaggtataaagggagattttccttgtctctccctcaaaatgaagaacacatgtaaatccttgtttttcctggtgaggcaggggaggccatagcacaatgcttaactgcatgcatctaacatggggctggttttaaccccangcgctctgacctaaactgctcaagctcccggaaattccaagggacctggtggccttangtctttcaggtggaacggttgtgcgacatgggaaagaaaaccaagcggacagcttgacagttcttcttcagaggatgaggaggagtatgtttgtggagaaggtgctagacaggcgcgtggttaagggacaagtggaatatctactgaagtggaaanggcttttctganggagcacantacttgggaaccttgataaaaaactttggattgcccngagctnatttctcgagtttatgaaaaagtataagaagatgaaggagggtgaaaataataaacccagggagaagtcagaaagtaacaagaggaaatccaatttctcaaacagtgccgatgacatcaaatctaaaaaaaagagagagcagagcaatgatatcgctcggggctttgagagaggactggaaccagaaaagatcattggggcaacagattcctgtggtgatttaatgttcctaatgaaatggaaagacacagatgaagctgacctggttcttgcaaaagaagctaatgtgaaatgtccacaaattgtgatagcattttatgaagagagactgacatggcatgcatatcctgaggatgcggaaaacaaagagaaagaaacagcaaagagctaaaggaggggatggtctctgtcatttctctttgtacataatacattcacctccctgcctcctctcctttctacccacccctttctatcctaaacacatccataaaaaatgtgcttatcactgtgctccacaggagaaatgttggtattggttctcttgtaacataactgatggtctgattaatgataagtgtctctctgtgaagaccaggcatttacatactgagtgtaatacccacaatttttttttcctttgccctgatctcttccttctgcttccctgtgacctcaagatgagtttcaactttttaatcaccttagagtcttgatcttttcagggttggtcgctttttaggttgggggattttgttacaatgatgttgaattttggtttcttgctttggttcttagaacatgttgctgactagctggcctttgttctgacatgttgagatggaaaggatgttgcccatctgttaaaaagccaatagcaactgcctacctgttggggctttcccaaccttgttcagctctacccaggagaatacagggtttctggtgtggtcttctgggccaccctctgttgttcatcctcactcatcctcccagaattactccatcctttggaagatttgaaattttacactgaaatctgtcaagacactctttttagccccaggactttcggtattgcttttagcactccccacttctgcttctgtaaagtgatatcaatttgtgataaaatgacaagattattaactgtgcagatttgtagctatagtacatgaggatgatggggtagggtacaattgtctttattatcatatatggtatgtatgtatgatttctttccattcctcatatttagactgtatatttatgtaggtgtgagtgattgcctggtgcttgcttgtgccaaggtgctaggcaccctccaaccctgccaacttttgtggcctcccaaagcattcctgttaccaaagaggcttcaaacctgaccctcacttctcagtggacccgagtttcccttccatgccattattttcagtggggaagttttagaggtgagctgttggccacaatatcaattttaagtgttcatagcagttatgtctcctgcattcttggctcctggatttaccaccaagagtccccaaaatattaatgctcttccctttttctaccctcaaacttatagttgtatcttattttttaaaatgaattttcatggccaggcacagtggctaccgcctgtaatctcagcctctcgagtagctgggactacaggtgtgtgccaccatgcccagctaatttttgtatttttggtagagatggggttttaccatgtttgccaggatggtctcgatttcctgaccttgtgatctgcccaccttggcctcccaaagtgctggaattacaggcatgagccaccgtgcctggccacctctattaaatttttgtggacaaaaataaaattgtcattatttgtttgctctcatggagcactttcagtaatacaattttttttaaattccagttgccctctttgttgctctgtcctctgtaatacctgactttgctaaagacttgaggggtggtttcagaggagggtcaggtgatgggaaggcaggatgagaaaagccctggacttgcatgtttgagaaggcttccaaccacatcttcactcagactcttggaattcctgtccccaaaacaagcttctgttttttgctcacaatgctatatttctaaatttttcctgaattactgagaagcagtcattagctttgttaagtttggtttggggacattgttggtatcaaaaatcgaagtcttattcatttgatgtaggccatgaatcatcaataactggttgctggaaagcttgactaccatccactggggtgctattttgagaaggatttttgggtatctttatagtctgcaattagttgatgattgctttctagtttatcaactgcatttatatttgcttttctgttcatggaaaatcctttatttgctggggttttttgtttgtttgtttgtttttcccacttacagcaagtaaaagtggtctgaggttatccttgtttttcttcgcggtttgccatgtgtgaaagtagatttcctgctattgatatattctcattatagacagaatagtggagaacagtgttgccatggacaaaatccagttttggtccactctggggagcatttggacctgtggtgcttctaacaattaaaagtctagatggtccttgactgtcccccagccatactgcatactactttgtgcattctactttgtgtcattaatgaaagattggttctgtccctgtaacttaggcatttattattcttaactcttcattcctgttctgtagccacccagcagtccattttccctatgttcaggccaaaccacagggcattggggaaggtttttgggattttcttattgagattttgttgaatctgtagtttaccccagctttcctaaggtacagtgaggggttggagggatctgtgtttggcccggggagcaattgtctctaccttaaggttcagttttgagggcataaaatactactttgcaatgtcatgagaacaccattagatctgaaatgtggaaatggtttctcacaatttaaaggaaaaacccactttgcacccatgatcccatcattttggttgagattttagaataaaaaatatagtgttgagatccgtacttttgtaatcagaccaccaagcatgcctgtggcaaggcagagaggaaaggtctggagccagtgtattgcagtttcatgctacctttacctgctaatcataaaaattatgttttcaaaagtagatgatactagccttacacccaaaaacatgttctgaattagatgccccctcacccaatttttattaagctttctaaattccagccacattgctgtacatcaacattggtttcattcaacagacatttttttggcctgaagatacaaggttcagaaagaggccatccctgccctcaaataactttcatactggtgtatgatgaactgaccattaatagtttaagtgcttacaagctatgtttctgttcaaaaaaaaaatagtttggtataataaatgctataaaccaatacacatttctgacttgggggcagagacagactggctgatgttgtatagtttgtagccctggagtaagaagttgacattaatttcggcctatatgtggaaaagacctataacattgggtgaactgagccagctggccatagaacacaagaacatattccaggaaataaatatagctggagggttggaaatgctgttattactgagagagaaaacaggtgagttgggattgagaactcctgattttcatccctggtttagattcttggccaaagtagtggtagagttaatctttgcttgtggaaagcattaactatgttgcagattcagttgtgttacattattgtgggttctataacaacatattcctcatggacactttaccagagttgctcacacctttttcaatttctcatcccttttggaggaatgaacatgagacttaactgcctttaagcctaaaacggacatgctttccaatgacaagagattttctaaagagaagtcttggagcacatctgttaatacctgagcatctactctgagcagtgcagttttattcaatactggagagagggtgatttctttttttttgagacggagtcttgctctgtctcccaggctggagtgcagtggcgcaatctcggctcactgcaagctccacctcccgggttcacgccattctcctgcctcagcctcccgaggagctgggactacaggcgccggccaccacgcccggctaattttttgtatttttagtagagacggggtttcaccttgttagccaggatggtctcaatctcctgacctcatgatccacccacctcggcctcccagagtgctgggattacaggcgtgagccaccgcgggcgagagggtgatttctaagcagagaatgtatcagttatgtggaaacctttgcagaaatacatataccttgtatattaaatctgagtctcagatttaatcatcgaagcgtagctgggttaagaaacagtctgatcgtaaggatgtgtcgattctgacccatggatgaccacaagaaaagatatttatttctggctggataatgggagtggttaattggaggtcgaatcccaggatttaagtaatgtccggaagtaaggggaggtttaaaagttctaaacaatggggtctctggcggcggatctgggttaccaccattgtttaagattcacggcctaacggtggtggggtcaaagacggaagggttgtttttctcttacttttttcaagaatttttgaaacnn

SEQ ID NO: 22034 - DNA, 2473 bp, Homo sapiens
  misc_feature 1, 2, 3: n = A,T,C or G
nnnagagcagcaagtttccatttggcattagcccagcacagagccaccggaacatcaagatcctagaggacgaaccccacagtaaggatgagaccccactgtgtacccttctggactggcaggattctcttgccaagcgctgcgtctgtgtgtccaataccattcgaagcctgtcatttgtgccaggcaatgactttgagatgtccaaacacccagggctgctgctcatcctgggcaagctgatcctgctgcaccacaagcacccagaacggaagcaggcaccactaacttatgaaaaggaggaggaacaggaccaaggggtgagctgcaacaaagtggagtggtggtgggactgcttggagatgctccgggaaaacaccttggttacactcgccaacatctcggggcagttggacctatctccataccccgagagcatttgcctgcctgtcctggacggactcctacactgggcagtttgcccttcagctgaagcccaggaccccttttccaccctgggccccaatgccgtcctttccccgcagagactggtcttggaaaccctcagcaaactcagcatccaggacaacaatgtggacctgattctggccacaccccccttcagccgcctggagaagttgtatagcactatggtgcgcttcctcagtgaccgaaagaacccggtgtgccgggagatggctgtggtactgctggccaacctggctcagggggacagcctggcagctcgtgccattgcagtgcagaagggcagtatcggcaacctcctgggcttcctagaggacagccttgccgccacacagttccagcagagccaggccagcctcctccacatgcagaacccaccctttgagccaactagtgtggacatgatgcggcgggctgcccgcgcgctgcttgccttggccaaggtggacgagaaccactcagagtttactctgtacgaatcacggctgttggacatctcggtatcaccgttgatgaactcattggtttcacaagtcatttgtgatgtactgtttttgattggccagtcatgacagccgtgggacacctccccccccccgtgtgtgtgtgcgtgtgtggagaacttagaaactgactgttgccctttatttatgcaaaaccacctcagaatccagtttaccctgtgctgtccagcttctcccttgggaaaaagtctctcctgtttctctctcctccttccacctcccctccctccatcacctcacgcctttctgttccttgtcctcaccttactcccctcaggaccctaccccaccctctttgaaaagacaaagctctgcctacatagaagactttttttattttaaccaaagttactgttgtttacagtgagtttggggaaaaaaaataaaataaaaatggctttcccagtccttgcatcaacgggatgccacatttcataactgtttttaatggtaaaaaaaaaaaaaaaaaatacaaaaaaaaattctgaaggacaaaaaaggtgactgctgaactgtgtgtggtttattgttgtacattcacaatcttgcaggagccaagaagttcgcagttgtgaacagaccctgttcactggagaggcctgtgcagtagagtgtagaccctttcatgtactgtactgtacacctgatactgtaaacatactgtaataataatgtctcacatggaaacagaaaacgctgggtcagcagcaagctgtagtttttaaaaatgtttttagttaaacgttgaggagaaaaaaaaaaaaggcttttcccccaaagtatcatgtgtgaacctacaacaccctgacctctttctctcctccttgattgtatgaataaccctgagatcacctcttagaactggttttaacctttagctgcagcggctacgctgccacgtgtgtatatatatgacgttgtacattgcacatacccttggatccccacagtttggtcctcctcccagctacccctttatagtatgacgagttaacaagttggtgacctgcacaaagcgagacacagctatttaatctcttgccagatatcgcccctcttggtgcgatgctgtacaggtctctgtaaaaagtccttgctgtctcagcagccaatcaacttatagtttatttttttctgggtttttgttttgttttgttttctttctaatcgaggtgtgaaaaagttctaggttcagttgaagttctgatgaagaaacacaattgagattttttcagtgataaaatctgcatatttgtatttcaacaatgtagctaaaacttgatgtaaattcctcctttttttccttttttggcttaatgaatatcatttattcagtatgaaatctttatactatatgttccacgtgttaagaataaatgtacattaaatcttggtaagacaaaaaaaaaaaaaaaaaaaaagcggccgcgggcccatcattttccacccgggtggggtaccag

SEQ ID NO: 22035 - DNA, 1234 bp, Homo sapiens
  misc_feature 1, 2, 3, 32, 50, 1232, 1233, 1234: n = A,T,C or G
nnncgctgccggggtgaaatcgtaggacagtnaagatgctgctggaattntccgaggagcataaggaacacctggccttcctgcctcaagtggacagcgcgggtcagcgggcgtgggggcggtgttctgtgggctggggaggaggtcaaaggcagcgcctggcactcaacagccttctgactttcattgcagtggtcgccgagtttgggcggattgctgtggaattcctgagacgcggcgcaaacccaaaaatctacgaaggcgccgccagaaaactcaatgtgagtagtgacactgtccagcatggtgtggaaggattaacgtatctcctcactgagagctcaaagctcatgatttctgaactggatttccaagactctgtttttgttctgggattctctgaagaattaaacaaattgttgcttcagctttatctggacaacagaaaagagatcagaacgattctgagtgaatggcaccaagccttcccagttatcataaccttgaatggcgactagatgtacagcttgcaagtagaagtctcaggcaacagattaaaccagcagtgactataaagctacaccttaatcaaaatggagatcacaacaccaaagttctacagacagacccagccaccctgctccatttggttcaacaactggaacaagcattggaagagatgaagacaaaccactgtaggagagttgttcgcaacatcaagtagtaccagttttaaggttttaattcatttgaatcacttatgaattgatgatatacagcaattacttttcaaaattaattttttattaattcatgatgataaatacatagtattcctcagtatctattccaagatactgaggtcataatcagaagctaagctgggtgcagtggctcatgccagttatcccagcactttgggaggccgaggtgggcaaatcatgaggtcaggagattgagaccttcctggctaacatggtgaaaccccatctctactaaaaatataaaaaattagccaggtgtggtggcacgcatctatcagagtcccagctactcaggaggctgaggcaggagaatcgcttgaacctgggaggtggaggttgcagtgagctgagattgtgccactgcactccagcctgggtgacagagtgagactccatctcaaaatataatatatttttgagttaaacaaaaaggggggctcaaattccccgagggccattacggaccgnnn

SEQ ID NO: 22036 - DNA, 284 bp, Homo sapiens
ctagagctgatgacagccaactggtcccaaatgtggaagtccagcgaaaaatcagcagagccacctacccaacccacagttggcttagaagataattccagaagagctgtccaactaatgcagagactcctcaaaatctgagttagttgcatagttgacccacaggaatgtatcagctttaactggctagggtccctgtgaaggaatgggatcccgaggtgcttgccaggaccgtagcaggcggaagctgctggcagcgcgaacgggcggctccccccccgcgt

SEQ ID NO: 22037 - DNA, 1435 bp, Homo sapiens
agtcgacccacgcgtccgatcagtgctcttgacccaggtccagcgagccttttccctggtgttgcagctgttgttgtaccgccgccgtcgccgcctgctctgcggggtcatggtgtgcttccgcctcttccccggttccgggctcagggctcgttctggtctgcctagtcctgggagctgtgcggtcttatgcattggaacttaatttgacagattcagaaaatgccacttgcctttatgcaaaatggcagatgaatttcacagttcgctatgaaactacaaataaaacttataaaactgtaaccatttcagaccatggcactgtgacatataatggaagcatttgtggggatgatcagaatggtcccaaaatagcagtgcagttcggacctggcttttcctggattgcgaattttaccaaggcagcatctacttattcaattgacagcgtctcattttcctacaacactggtgataacacaacatttcctgatgctgaagataaaggaattcttactgttgatgaacttttggccatcagaattccattgaatgacctttttagatgcaatagtttatcaactttggaaaagaatgatgttgtccaacactactgggatgttcttgtacaagcttttgtccaaaatggcacagtgagcacaaatgagttcctgtgtgataaagacaaaacttcaacagtggcacccaccatacacaccactgtgccatctcctactacaacacctactccaaaggaaaaaccagaagctggaacctattcagttaataatggcaatgatacttgtctgctggctaccatggggctgcagctgaacatcactcaggataaggttgcttcagttattaacatcaaccccaatacaactcactccacaggcagctgccgttctcacactgctctacttagactcaatagcagcaccattaagtatctagactttgtctttgctgtgaaaacatgaaaaccgattttatctgaaggaagtgaacatcagcatgtatttggttcatggctccgttttcagcattgcaaataacaatctcagctactgggatgcccccctgggaagttcttatatgtgcaacaaagagcagactgtttcagtgtctggagcatttcagataaatacctttgatctaagggttcagcctttcaatgtgacacaacggaagtattctacagtcaagactgcagtgcagatgacgaaaacttcttgtggcatagcgggggagctgctgggaggagtattatcaggtgcgggtatttatggtcaggccatatggtgtttggcattttaactgcgctttggttttaaattggataaagattttcccaggggaaatggtaaggagggaattttaccctgaagcttaacggtttaaacaggttggggacaaaagggaagataatatg
